United States Patent Application Publication US 2026/0058010 A1 - sequence listing, part 48

SEQ ID NO: 529 - DNA, 1199949 bp, Homo sapiens
  source 1..1199949: mol_type = genomic DNA
aagtttagtttaacgactggctagagacgtggtaatcaagcatctcactgacaagcttctgttttcttcttctttgtgcatggccatgtccatgtactgcctgatcctacccctgtttcctacctgtgctcaggagcggtgacttctaggtcacatcctttcttgctgaccccactttggttcctgacattttttgtggtcctcctgcagaccatttaagatcaatgttaaagcaaactaaatatggcctgagaaggactccatatttctatatttgagtcctgtggatgaactgtaacctagcttaatggtcagacaaaattaaaaacctaacttaatagtatgcacctgtaacaatagctaagggttggccaatcccagtggtcataattcaaccactcatagactcctgaatgttcaaactgcgttcaaataaggcaaacgccaagctgtaaccaatctcactgtatctgtacctcacttccgattcttgtacatcactctacctgtttggtctataaatttgttctgaccacgaggcacccctggagtctccgtgaatctgctgtgttcctgggggctgcccgattcacaaattgttcattgctcagttaaactcctttaaacttgattcggctgaagattttcttctagcatcagtcatgaggtcccatgagacagcagtgacagaactggaagatactttagacagtaattcttggtgggaagataccttgagttgaacccagagtcttgaaactaaaatactaaagatactttgcactggggtggtggtgagagaagtatttcttttaaaaaactcccaaccactacccaagcctgattcctgcaatgtacagcaatgaaggcagatgaagcttcctggccttaggttgaacatacagccctttccactttgggttggctagtgtcatgtaactctttttagtttctttattattattattatttttgagatggagtctcgctctgtcgcccaggctagagtgcagtggcgcgatctcggctcactgcaacttccgcctcccgggttcacgccattcttctgcctcagcctcctgagtagttgggactacagccgccaccacgccaggctaattttttatatttttagtagagacagagtttcaccgtgttagccaggatggtcgcgatctcctgacctcatgatccgcccgcctcggcctcccaacgtgctgggattacaggcgtgagccaccgcgccggcctattattattttttaaaacaagcattaaaacatgcttcagtgctctttcatatgcaaagaagcaaccctgggagcctgcgccttttccaggccctcatgccttcagaagccagagtgtgctaggagcaccgggggtgaggacatagcttcagcctgaagctgttcactggaggtatcttcctagtgtgtgcagtgggccttactcagtttcccaaccctccatctcagagaaagacaaaaccaattggatatggtgtatgtacttgtcaaactgtttatttgccattcacactgattgtaacactggatttacagaagaaactgtggtacaaagagaggaaggctctggtggctcctgaacagcagcagtccagctgccctgctcaggctgggcacgacgaatgctcccaggagaggggaggcggcccacccgactgtgtaccgtggactgtggacagtgcagtgcctgctctcctgtgctatctagaaacaccttggagagagggttctgggatattctctcatgtcatctggctgaagacaccagcttgacagttcccctttaagaagcattccatacgtttgtaccagggagaaagaagcccacgcacgaattttcaggatgttttgtgaccaaacccaataactgccacacaaatagaccctaggtgggggctggcttaaataggaccacatttcccgttgctttttcagtagatgtgttataccgtcatttcaatttgaaagtttatttttttccattgatttttatacatccagaataacacaaataaccaacagttctttttctttttttgcacattcatttcccctagaacaaaaaaagtgaacttaaaaaaaattggaaccatgctattagctgtttacaaaagtgaataagaagtagctcattttaaagtctaaaataaacaaagtagaaagaagcatttttttccctacagtatttagcaaacctaagaaaaagtccttagaaacacacacaaaaaaattgaaaaaaagttataggcattaacaatattttataatgaagcttaaaatctatttacatacataaatacaattaactttgttgatgcaactcttctggaaggaaaaaaagagccaaatgatcagcctcatcaatactgacctggctaaaaacaaaattcccaacaaacacacaaaaatcccaaaacaaatgtatacgctacggtaaacaaaaaggcattttgttcagatgtaaaatatgttttgtgagattattgtcaaacaaattttcatgtataaaagacccaaacatgtcattccccccaaaaataaaaaccaacaaaaataaaaatcatcaggacggaatgtcccaaagaaacaggtatttcaaggcagaaatctgcaatcctaaattgcaggacatttgagtggaaccattcatttcctttctaatcagagcatttctgtttatctgcacagaaacccaaggcagcagaaaggctgtctatttactcactgattgtgatttgcccaggaaagtttgctggtttggacagcaagcagatccaatatggttggcaatgtctctgttctgctggaagaaacccataaacaggagaaaggctgacaaaccatgttcctttatgtgaagggggaagaactggaccttcttgtgttctgaaatttggtactgggtgggggtatgtgctatctgcttaagagaacacaggaaaaggaggagggagaaagtggggtttggaagatagaggaagagagaaaaaaagggagatattggggggaagagagggagggaaatgtattttcagatagtgagaaaaagaaagaactgaaatatgtatccatgttgaaatcataaatagggacatgagtaagcagtagaaatggcttattcaatacttctcctggaccagacacatgcagttattacatgattggcttaagggtctcattgataccttaactttcctgagggcaatgaataaaaagataccttaatctacctgaagtcaatgaatgcaatttttcacacacacacacacacacgcacacacacacacatacaaaaatgtgttgcgtgagacctatcgccaaaacaactacagtttgattttttttgaaacaattaaatactatatatgctggtaagagtctgtgaaactctaaatgaccaatccagtgagcctacaatagtgacaagccccctccacacatggctttgagagtaaaggttcaatgtaaaagattatctaatcagagcatgaggctggttttgagttggaatatcttcagttaacagaattaaactgaaaaacataattttttccttcatttttctccagcatttttgcaggtcagacatggtaacatgtgctgaaaaaaaacatttacgtttaatttgggggaaatgggctaatggtgcttttcagaaattaaatttttacatttgctgacattttatggtaatttagctgcaaaaatgtaatacggaataatatatgaaactgagttgtggagggaatcctgtcaaaaatgaaagtgaatatattctgagtttgtccgagatctgctatagctcttctctagataagaacgacctgacaacataagctgctttactctttaactcttaccaaagtgctactgcatgtgtgtaaaacaaataatcaatatatatataagaaaactcaaaaacaagttgttttaaataagtccagctgtttttgctgcctgcagccaaagatttgcctaatttgaatgcttaaatttataaaataaaaatcaaacactgttctgaagtcctgctttcaaatactcttcagagttgacctgaaatcgtttcaacgaattttaagaggtacgttaaataaccaccagatcatttggagcacacatgtgtcaaaatcagcagttagtatttatgagttgtacaacaactgcattctgaccaaatcctccaataaaaatagtgccataaaatttacagcgacattggatacctttgaattgtagccacggacagtagtgacatgaatctttcctgtcacactggtgcacaggtaaaagcccatataccccatagggtagggtctcagcctggtgaaagcaacacaaagatgttgttgagtgagcagcacaggacagggggtctcgcacaggtgggaccatgttttcccacttgtctccactgaggcacacagaggcaaattgactcctcgaggcctgcttctggtgggcccttaaattgctataatcgtaacccctaaattcattgatttggttcctatgtaaatgtggctcccctacacagtttactttggctgtgttctgttacacagcatctgtgaaattatcagatgaccttggggtgagcaaatccctgggcagaaatcaaatcctctccaaagatgtaattattggcacctgcctcaaccctctggaactagattgaccttctctgttttaaggaggaagttagatatgagacccttgttgagcctggcagaaaattccatacttctgatccttggagtgaccctcagtgtctaaaaatcctattaaaaacgttgctgcgtgagctactcacttgtttgattaacatgaaagggagtttaatgtaaacaatacttctggataaccaagcgatcacattactcattctttttttctagccttcttcaatgtgatacatttaactttggctactatcaagaacaaaagaaaatgtagtacttgatatttttcttaatataagtacatttaaataattaaaaaattatcaacacataaatgtctgaacatcaagatacataaatatctggggattccttgtgggaatacagtagttaaaaatgacccaaagctgtagctgtttctcaaaaaaacaaaacaaaacaaaaaaaaacaactacccaaaagtccaaaagaaaagttaaataaaacttaaagaaaagggaatcatatttctttccatggtcaaagcaagaaagaagcaagctcaatttatatatatttatataaacgtatataaaaataaaaaccacccaaatgcaaatacgcattttgcaattgataaggtgcggaaaaattaaaaataagaattagatgccaaacagggcgagttgcatccctcctctccccccaccccaaccaaaattccacactctttggaataaacaacttggttaaaaagttaagtcaagggtataaaatctttctttttattcacagcattgctaaatcagaagcattcacagtttccctccgggaatcttcctgtttgctttccagcgcgtcccctgggtgctggggccggcggacaccctcgaggtgcgtcgcctcggacacctccgcgagggccggggcgccagcagacggcggcggcgtgggcttctgggcgcaggaggctgcgcgggcctgacctacagcgagatcctggccgtcgggcgccctcggccccaggacggtggccgggcccagggcccgggatcccggcgggcttgtcgcgaacaggaggcccgcgcgcccggaggcgaaggcggcggcccgcggggcccagccgggccaggcctggcgcctcagtagggcctccacacggcctcctccaggcgcgcggagggcgccatgttggtgggggagttgctgtggctgccctcggcctccaccacgtcgctctggttcgggaggctggggttgagcagcgcggagccggtggaggcgttggtgcagggcggcaggatgcgcggcggcgagcgctcgccgcccaccatggagaactggtaggagccggccgaggcgccgtagtacaggtggtaggagggcgagctggcttggaacgggcctccctgcgcttgcgacgagccggggtagggcggcggcaggtaggtgtggtagcgcgtggccgagcccatggccgacatgccgatgccgatgcccgaggtgaccggcgtcggggagtaggtgaaggcgcctggatagtgcatgcgggggtcggagatggagggcagcgcggggaactggcgcgggtcgctgaacgctgtcaggtcgggtgccgctgcagggcgggcaagagaacggagcggaagtgagtaggaggttgcggaggccacagctcttccctctgccccagggggctacccaggatgataccgcctaggaggatgggaagccacccaggatgctactgctggggaggacggggaccacccgggatgctactcccaagaggacgaggattacccaggatgctatacccagggggacagggaccacccaggatgccacctcctgagatgacgaggatcacccagcatgtcacctcccaagaggatggggactacccatgatgctatgcccaggaggtcggggaccactcaggatgccacctcctgagaggacggagaccacccaggatgacaccacctgggaggatggagaccacccaggatgctaccgcctaggaggacgggggacacccaggatgctactgtccagggagatgggtttctatcagaatttaccgcccaggaagattggaaccacacaggattgctaccacctgggaggatgggggctactgaggatgctgctgcctagggagagggtttctacccagaatctgccacccaaaaagatgaggtcacccaggatgctatgcccaggaggacggggatcaggaggctgctactgcccaggaggatggtataatatacagtaatataatacggtaatatagaatatcatgtaatgtaatatgacatgatatatgaaatgatgtagtatagcataatatgtatagtatagatataatgtgcaatagtatatactataatatgtataacgtatataaaatgttgatataatcctagggttggcaaactgcagcctgccagccaaatctggcatttttgcatgtcccaggaggtaagaatgcattttacattttttaaatggttgaaaaaaaaatccaaaaaagaatacttcctgacctgttaaaatgacaggaaattcaaacttcagtgtccatccatacttcggaacacatcctcactcattctttcatgtactgcctgtggttgctttagagccactactgtaaagtcaggtggtcagtatagggactgcaggagccacagagcaaatatttattcttttttttttttttggagacaaagtctcgctctgtcaccaaggctggagtgcagtggtgtgatctcggctcactgcacccaccacctcctgggctcaagcaattctactgcctcagcctcccgagtagctgggattacaggcgcccgccaccaggcctggccaatttttgtatttttagtggagatgagatttcaccacgttggctaggcaggtctcgaattcctgacctcaagtgatccacctgcctcagcctcccaaagtgctgggattacaggcatgaaccaccgtgcccagccctaaaatatttattctctggccccttacagaaaaaagtttgctgaccctctatttgatcaatatattaatataccaataatataaattaatctgtgatattaatatagcagatgataatttgacactaatgtaaaggatgcacaaatatgttactactaacacaatatgttatacataatatatatcctaacaatattaatatataataatacattacacatagtatttaggttgaatgatagaaaattgccatttttataggccttcgacagttgaaaaattgataatttcctagtatttaagcgaatgcatggctcagtagcaactgctgagcgaatgtcagggaataccattaccactcctcctctccatatctactttcatactagttccacaattttagaaacagtactgccttgagttcacctggtattctctattatgcacttcactagtttgttaacacaagtagatgtaggaccttgatttatctactctgttttttgcacatgtggaaattttaccagaaattgtaaagctttgtctctaaaactcactttgttacgactgtacattattttgttaggattatggatttacagtttcaccaactggctttagggctgtcctgtggttcactggctctctctgcatttttcttacctacaggccgcccttgggaactacggaggatttgtgtattaggcagggttccctatatctgtagatcagagtttctcaactgttgacactgttgacattttgggccagatcatgatttgctggggtggagggggctgtctcgttcatcgtaggatgtgtggcagcatctctgctttacccattaggtgttagtagcatcgcccgcccctcttgtgacaactcagaatgtctccagacattgccagatatcctgcgggtggggtgacggaagcaaagtcaccccagctgagaaccaccactgcagatgtagaagggcaccctggagaagttcaggttccttagaattattcattaaatgaccaggctaggactctcctctttatatcagcaaatccacagacagcaacaaacagtagaaacatgaattcattgttttaaaatgtgaagttctcagatcaacacacaaaataactcttaagctcagatggcatgtggcctgtgtccttttgagttcaggctgatagagaaagtcgacagagccaaaagcttgctctgaaaggaaagctaccaaggtggattaatctgtttttggaaggcagcggcagttgatcaacttcctcatatttcaagcctattattccagcagggagagctagtgtgttttctctctctctcgctcgctctctcgtctcttccacaccccatcctccctccctctaatggccttttattgctctaacacatttttaaaaatgaactcctctgtacctttggggtgaatgtgatgaggggatacactcctcatcagaggtaattaaagtttatagaaacagcccaagtctgtagcagatcccttcactaatgaggaaaccaggagtctgactttcaaacaaacactcctgttaatcttttcaaagccaggcagacatgtgggcagggaaaacgttgtaaacggacagtggttctgaggctgcccttccttggccacactctagtcattctcgagccaggccacacctcattccacagggttcatccctgcccgctctttggggccatctgtgagcaagccctgtgtcacttgtttttgctgacatggagagctgtgacatgtttgagagttaacaggaagctttactccatttttccatttagatttatagagtctacggagaagctgggacaggaggaaaagcattaggcaaatacagtcagtttgttgtcatctgatgcaatactctggacacaaataaatgactctgcccattattcctcttgcttcatttgccctgagacaaaaaggtgaatccactggaaaatgaacgaaaggtcaccctgttttacagcaatgtctggacatgctctgccagtaggttccaactactacatggtaatgtggtgatggtaccaagttactggaatccagagtgagtccgtgatttgtcatggacataagtactggaatgatgttatggtctcagctgttgggggaaaatagttctttcacttgtgaggagaacatccaaaagaaagagctgcaatgctgcctgtgatccttcttctatgtacacatgagcaacgtcatactacaaaagaccatccatttggtcaaactatcttttttacacacattttgataatacaatatcttaggccttctagatatgctcagattcaaatgctatattcaaatgttggttttcatctttgtgtcttgtctcagatcccttattcaaacccatcagtctgcgcagttcacccatccagctgtagctcttctgtccttttggctggcctggtgtcccctgattcagcagaagtgtggggggagttgggatcccctgatattcacagagagtttttaagagtaggaaatctggggcttaggaggtccaggtattttggttggaagtgttttcccattgatggggctaaatatttgccatgacagctcaagtcttcgctctccagcttgacatggatgaaagcagcctcgctacagggcccctcctactgcccccagaggattaaacaacctgagcaggtaatggctgccttaaaaggagcttttgcatgactcagattaatgcatgctgtctgtcgcccaggttggcagctaaacattaattttttttgaaaaagaaaaaaaaaagtaaacctctagatgacaactcttttcagacaaggtgtggagtctgtctgcaaaggatagagagagagagacagacagagtccaagtccccagcgcagaaggaagcccaggtggggctggggccgggaagaggggcagagcacaaagctgtcgggctggattaaaaggcaaagcagccacagagcagtgtcaggttctcaaagctgtcggccaggcagccactttccttttatgtattccacccccctcctgcctccaggtttatgacaacacttttcaggcctgtgctccaggcttgatttctcagagggagttctgccaaattgaagagcagtctcccatactgttctatgccactgtgaaagctcatctggaattctgtcctccctccaaaaagaaaagaatcattcttgggttctgaaatgaggcatggtttttatctacttcacactcccatgccataaaatgttctctcttactccttgggtgattgaagtccaggatattcacaaatgtaactgtgatatgggactttggagtgcacatgttactcattccttttatttaaaaagtcaccctaccatctgaacaccagtcagctggaggagttggcccctagggttcttggactataaggtgctgatcttgggtgatgaccaagtcaaaagacttatgtaataaattccaaaggatagacccatagcaggaacatttgaaggagaacaggcattatttcaggtgaagaccgtagccggtgtgcagaggggtgccctgagaacaatcagtaaaagctgacaagtgcctttgttcttgagggataagcttctagaaaccacaagctaaacaagatgccaagatacctgtgctactctcaatgccttggagcagaatgtaccatgaaaatattggcattaatggccaaaagtaatgtgaaaaccaagcacttaagttggttttcctattttactgtaccacccaagaacactggaaggcagtggttctcacctggggacagttttgccccttgggaaatttggcaatgtctggaaacattttttattgtcctaactggggtgagggggatgctattggcatctagaggccaaggatgctgctaaatattctccgatgctcaggacagaccccccccaacaaagaattatttggccccaaatgtcaatagtactgccgttgtgaagctcttagaaggcattctgtgaagctctgaacagcagctaaggcatctggtgaaacctgaagtaatcacaactgtctggaaaacacaacattacacaacatttaaaatggcagacatgactccactgcccctgtgcctgccccctaatctgctataatttgatcccaagagctgaaaagcaagacccgccccgttcccccaacacacatgcgagtgtgtttgcaggcatcataacactgaagttctctgaagtattttcacagtttggtgcagctccaatttcaaagccccaaacactaagtttcttcttttgccttcaacaaaggaatttttctctgtaactctgatttccctgcccacgagcaaaggtgagtgccaagcccaaagggctcataggttaaatgactaatacttaatgagctcatattaacaacaattatgctaaccatgacacctgagtttttcacgctgttcctctggcctctgtatgaacagcgcttagttggaatgtctaatttggggtatacagtcggttctctatatccgtgggttctgcacctgtttaaccaactgtagatcaaaaatattattaaaaaaaaggatggttgtgtctgtattagacatatacagacttttcttcttgtcattccctaaacaatgcagtataacaagtatttacatagcatttacattttattaggtattacgagtaatctagggatgatttaaatacatgggaggatatatatgttatatataaatataccattttatatgagggacttgagcatccatgggttttggtatccatggggggtcctggaaccagtcctccatggataccaaggggcggctgtatttatttcccattccacatgtactcccgtgtgctgtccatgtgatctgtgaaaatttaccaccaccgcatggaccagtcccattagtccagaattcatttggaataatgagtcctaaaagttgaaaactttggctttttatattgttcttaacccttcagtcaccatcctttcttgccaaatgtgaacaactttagatgtctaaggaacctacttctccaagccacttctgccttcacatccacaatctctgcctcttatgtatccaagaaaatcagtgcatgggcatgggactcagagtagagataggtcacctttaaaccatgttttactcaataatgttctgccaactccttcatgcacctctagtctcctggaccttccaccccagctcagctgcaaagaatgtgttttcaagtggcttacttgagagtcgactggaaagttctgcagagagggttgtcatgccgctggcacgtccaggtgaaatgggcgttgctgggtgcacagaaggagaggcaatggatcccaggtattggtaggactgatcgtaggaccacggtggggatggttggatctgccttgtatctgaagagaatcagaaaggtcaattatatgtaaagtggggtgggatttaaaaaatgtcttttaataagaaatgagtggcccttgttcaaatatgtcacatacatgtatgtggcctatgtaccagggtttaataagcctactcaagtccaagtatctgcctctgttggattattttcccccaaaagagactgattcttggagattttcacctgataactattccttccaaaggttttatttaatcatgctaacaatgatgagaggaatggattacactttcaaggtagaagtattaatgtccagactgttgaactgcagcacttgagaacttcaagtatcatatgactgctgacatgatttcagctttgccaataattacaattatcatcatcagaaacattttataaactcaggggatcacctgtctgtgttcggtaagaacgtagagttttgggctttttttttatacctttacctttggcaaaaagtattccatgggctggtaaatgttttatagtaaggcgaattctctcccaaggatgacaggaaagaaggtctggctgggaaaccggcaatgaggtctaatgactagttcacaaacccagcagtagaactggccctatcaacccaagccttctgttccttttcaggacttcgagtttgcaacttttaaaagtcagagtttttagcaggtattttatagattgccattataagaggcctgggatagagaagagacaaaagtctgacttcaaaagatttagacaaagtggattttgtcaatttgactccagcgttcaaaggagtcttaattttcaaaagcatcatactgtttgcagatgaaaaggggaggaaaaccaacgctattcttaggcaaatgtgtaaggaaacttaaattggacactgtcccactagaagacagttttacatttctttggagttaaacattaattttctctttatgtcccaactttgtggacaaagataacagtgaactaccgtaactcccaagggtcttcatagccagagcttcatgatcctgcaggtagcagtgtaggaagagcagacttctttaggaaaatactgggtataagttttgtataggtcaggacataaagaaatgagctatttctgctcattataaaatattcagatctgcttcctccaggggcttttcatttccagcagttcaagtttgcctttctgtttatctctttgaagctgccacagtggataacagaatcagacatttggagacccaagtcttcctccccagtattctcctgacagcctccctccctccctcatactgattcatttctttcttttttgtgtgtgagtgaaaataactgattttttaagtttaaaaaacctggtagttcccaggcaaatagtttaacttggaatctttgaaatctaatattaaagaaaggtcttcattttattccaaattttagaggatttaaagagctggcaaggaacaaaaggagctggtccattttaaactcagcagaaaataaatgttcaaccttggctgaagctcctgtgtaatcttacagctaacagtgtttccaatgactaaaggcaaacagaaatagcagacggttcaatatccccatgctactgcaagtattttgctccaagtgaaaaaaaaatcatatacttagatattttgtataagacatgcgtatatactagatacacacatttactaagtgaatatatagtactccaatactttaatcattttaaaagcaaacaaaagaggtttcagaactgtcataaagccccccggggtgtgaactgcagtacagtaattcacgccttgttgtgtagacagcctcacacctctaaccccatgtctaaagccacactaagcataaagtactatgccatgattcatgctccgtcatgttttactgtagtgaaaaagtcgtgctaggcttttctaaactcataattaaaccatgcaaacgttgcataatatttcacagcctttaaaaaatatgctttggtaaaatgatctttatgattaaagtccaagttctatgagtttttttgttttttaaagacaggcttgcagattccacattttctgacttcacaccataacttagcttttcaggtgctggaggggaagatggcagtcaacaccctgaagcccacccaacccccacatcagttttctttcatgagaccacagtgacctgtgcttgggttcattgccagtggtgggccagaaggtggggatggtgagcctctaatgttggggttttagttgtttcctcttctacctgtgttactaatagaaaacaaaaacaaaaaaggcctgataatatggtgcattctgggtttaatattcattactgtctttggtctgacagggccaacatgaactcatgggccacccgagcactggactaataggcaggagaggtgaactcttggtctttctgtctggtgagcaactgggtgacattggattactcactgacactttcttattctcacctccgaaggaggtgatccctaaatcctttccaatggtgacagagcaggattctaattccaataggtcctacacagtatttctttgctttacttgtacattaagcagagtcagggaagaatcagatgtggggtgaagagtggtgcctgtaataataaatttgtgtattctaggaagaggaagtagaggagagtacgatgggagttatccagaaaaggccccaggctgaggaagagaaccactgtaaatcattctccagagcacagggctacttgttcttgaaagagttgcctctgataagtcaatccatctaaaagaacaaaagcttattgaacatttacagtgtgccaggaatgtgctaatttacctggcaggagagtgatgaataagaccaacatggtccctgccccacaggcacttacagtcagtgaagatcccaggatcttgtgatgcttggaaaggcatcttcctgtggcattaatcatcatactgggtgttgcttcattcatttattcattcatgtgttcatgaaattactttttcattcactcatatttccaacaaacatttttgcttcacttgggccactgttttggggactcactagtgaatggaaggttcctgccttctggaagttacagctactagggtgcccaagggctgtatctgggctaactgctagattagctgcctaatttggacttgcaaacagctgttcccaaggtagaaacaagaaccctagtggtatctattacatgcttatgttctgcctctgagaggaggagactagggaaagcaccgaactcaaatcacagacaaatttcagtttgcatcctgccttcaccataaaccaactggatgaccttaggcaggtcacttattttctctgattcatagttagaattctgacttcaaagggtaataggagtaagtgagataaactatatggaaagcaagtatcacaatttctggccatagtaaatgctcaataagtctgaataacctttatgattgtattactaaaaaggaaaagaaatccatgccaagggacttatctgatgttcattggtgagaccacacacatttgctccaggataaggctcaagtaatagtgttttgttcacagctacagtcttgacagacacactcttcaggctggagaggagctgggctcaggagattaaatggtaaaggggcaaatttccaaagattggaaatttgggattaggatggagaaggcaggaactcagtatctcaaccaactcatgtttctattaaaaaatactggattcagggccgggcgcagtggctcatacctgtaatcccagcactttgggaggccgaggcgggtggatcatgaggttaggagatcgagaccatcctcgctaacacggtgaaaccctgtctctactaaaaatacaaaaaattagccgggcatggtggcgggcgcctgtagtcccagctactcgggaggctgaggcaggagaatggcatgaacccaggaggtggagcttgcagtgagccaagatcgtgccactgcactccagcctaggtgacagagccagactccgtctcagaaaaaaaaaaataataataaataaaaaacactggattcaaaaatttaaatttgagcctttatgcatactggttttccaggctaaatgatgtctgatgcagccactttactgaggccattttgtgatgggttattttcagctttttaatcatcaataatgggtaaaacaggccttctactccttgatccccattcccttccatttgaaatgggaagttagggataaggtagagttgaggttagtggtgagctcagaggtgtacacggcatatatcacacaagaagaaaggagaatgcttttatcttttgatgcagcaatattaaaatgtctctagagtcaacaatgacccttttaaataattcatgtcagaatgtcctgttgcttctagtttcagttccaaaatttaaagagcttgagagtcatcactcttgtttttataagaaaaaatgctgaacaaactgaaaatccatgacttttcttaagtccaatggaaagctgaagttgcagggcaaactgcaaccccaaattttgagaagcaggcaaatatagagaatcatagtgaggtctgcttgctgggagcagaatttctgaattcataaactgatgagaacacttaatggtgattttgacagattgctagaggctcagtacagactagtgtgcgaataagacactcctaggggctacagtttcaggaggaagtgcactgttgtgggtttttcattcaggaactccaccagattctcacaggatccaatatattattataacagtgggttatggctgaaagagcttcaacatactgactaaggaggagttcatagagaagctcacagatgacatgggagacaaaaacaaggacgctagaggaatttgaagtctctggtaccttctgaaaacattaaatacagcccaactcttgggtacatgagaataataactcacgctaaaggcctactaagttcctattgcctgataaatcatgttaaactttcaataaaaaattacaagaaaggcaagaaaaaaacacagtctgaagagataaagcaagcatcagaaccagacccagatgtgacacagattttggaattacaagacagggaatttaacaatgattaacatgttaatggctctagtggaaaaagaagacaaggtgcaagaagagatggatgatgtaggcagggagatggaaacttttttttttttttttttgagacagtgtctcgctctgtcgcccacactggagtgcagtggcgcaatcttggcttactgcaacctccgcctcctgggttcaagtgattctcctcctcagcctcccgagtagctgggattacaggcacctgccaccacgcccagctattttttctttttttttgtaatttttggtagagacagggtttcaccatgttggctaggttggtctcgaactcctgaccccaggtgatccacccacttcggccttccaaagtgctgggattacaggcatgagccaccgtgcccagcctgaaactcttaacactcaaaagcaaattctaaaaaccaaaagcaccctaacagaaatgaggaatggcttacttagtagacagaacatgacaaagcaaagaaccaatgaacttgaagatacagaaacttaccaaacaaaaagataaagaggaaaaagaaagaacatccaagaactgtgagaaagtttcaaaagatgtaatgtgtaattggaataccagatggagaagaaaaagaaaacagtggaagaaatacttgaagtattaatggctatgaattttccaaaattaatgacagataccaaaccacagatccagaaagctcagagaacaccaagcataataaataccaaatctacacccaggcatatcatatttaaactgcaaaaaaccaaagagaagagaaaatcttgaaagaagctagagagggggaaaagccaacaccttatccatagaggaaaaaggataagaattacattatctttctcttcagaaaccatgcaaacacaaagaaaggagaatacatgaagtgttgcaacaaaaaagctaccaaactattattctgcattcagcaaaattatccttcaaattcaaagaaataaggatattttctgacaaacaaaactggaataattcattgccagctgacctgccctatgagaaatgtcaaaaagaactgcataaaaaaggaagagcattagaaaagtactatattaaggtaaaattaagttttatttttcttaactgatctgaaagataactgtttacaataatagtaacaaagtattgagtgattatagcatgtggataaatgaaataaaaggcagtaatgatataaacaggaaggaagaagtggtagttatttgatgctagatgtagattagttatacatgtacttttcaaactttagggcagtaactaaaaacatttttaaaaagaatgattaatatgctaacagaggagataaaatggaatcatataaaatgttcagttaaacctataaaaggtagaaaaagaggtgtggggggaagaatcaggtgcaacaaatataaaagttataaatatgattgatactactgcagttatattaatacttaggttaaatatgaatactctaaatgcaccaatttaaagacagagattggcagtgtggattaaagacaagacccaactacatattgtctacaagggacctattttaaataaaaatatttatacagattacaagtaaagggatggaaaaaggtacaccatgctaacactgattgaaagaaagccagagcagcgatgttaattttatacaaagctgacttcagaggaaggacaattttcagggataaagaagggaattacatgatgataatgtgggtgaattctctaagaagacagcatctttaatatatgtccacctaaaaactgagtgtcaaaaaacatgaggcaaaaactgatagaactacacggagaaataggtaaatacgctattacaattggagacttcaacaaccctctttcagtaattgatacatcaagcaggcagaaaattaagacacagttgacctaaacggcactaccagtcaacttgatctaattaacatttatggaatactctaacaacagcagaatacacattcttcagctcacatggaagattcaccaagataagccatattctgggccacaaaacacactttaagatccttaaaagtatagaaagcatacaaagtattttctcagaccacatggatttaaattaaaaagccaataatagataactggaaaatctccaaatatttggagattaaacaacatacttctacattagacatgagtcaaataaaaagtctcaagagaaattaaaaaatgttttgaactaaatgaaaatacaacttattacaatttttggatgcagatagaacagtacttagagggaaatttatagcattgaatacatatattagaaaagaaagatccagaatcagtcactgaagcttccacctcaggagactggagaaaatagcaatacagacctcaagcaagcagaagagaagaaataataaaaattagactaggaaccagtgaaattaagtacaggaaaataatagacaaaatcaatagaacaaaatatcttgttctttgaaaagttcaaaacatccctctttgtcctcgtgctccccacaggcgctgggagaagatggatagagacccctcccggccctcctctgactgtccactctagggtcttttaaacacccaccctcagaagctgggtttccaacagcaccccttgagcggtggcacccttcatcctgggcttggagaaggttatagttagaaagccccttccttgattgtgtggctgacatctttaaaacgccaggtctttcagtcatctctcagagctatttaaaaataaaagtcacatagaccacagggttctaccatctatttttgaaaaaggcaaatcagcttggtgaacatataaaccctaggggcagccctggttatttccctggaggaattttttccctccttcatcctggaggaaggtagggacgttcccagggttccctccagattcacctcagtcatggggagctggtgtaatgccctcttggagacctcagaacacacaacaggatgtgactcaggactcagagatgtgagtcagtttccagggtgatgtgttagggcgagccccagtggtggtttgcatctcactgtctgggacccctgggaagaaaggcctaggctccccttgcagacaaagggggtgaccccagatgcttcccagcatcacatctgtcagaggtgtgtgatgtcaggggcctttcagagtccctgggggtgggtgactctgctctgaaagggacatttccctgaaagttccactgtctttgagaagcagtgtttcctctggcctctgcagcagggagcaaagctccggcacagcacaagtaagaagagcagtcacctattcctactacaggtacccccaggtagcagacaccggctcagcacactgttgctatatcattgaaatcccatgataacatgagtcagtcagcaccagctctggatcctggaaaaaagggaggttgtgaaacagctccaggatttgccaaccgttcgtctctggccggctgcagacatcttggttagtcatgtgtagctcagatgcattcgttgttccagcaattactttgaagagaagcagacagaccaagccggggcagaaccctgcctgggtatgctgttttaaaggcctcaggttttgagggatcccatcctcactgccgacctgccagcctgggaggtggcaggctgcctgcgggaaggaagaagggagccctgtgtccgcctctccaccactccctgcttccgggacccgtattcatcacctcgccggggaagctttgtggctttgtggtcagggccctgtgaatcaagaatgctggttcctcacatcaggccgcccccaaccctgctggttcaccctggagtccttttcttttcaaacctctgtttcctcacctctaaaaatgggggtaaccaggctcacttgcctcacaggtgtgagagttaattaatgtttgtggggcagctttgagatccacagatgaaaggtgctctataaacgcaaaatgcaattcctcattagcactgtcagacggttcccaggggaaacagttcaccctgcaccacgaggctgctaccctcagccagatgagtctgagacacgtctgggaaagggctacgtatttaggcagagtgcttttggagggagggttcaaggataggtcactagcttccagaaaagatgggtgtttttagaacatgtctcattctcagttggcatcgtgtccctgaggcagagggagagtggccttcagtgcacacagctggagggaccatagttcagagggaacagaaggcaccttctggtttctgctgcctcctcccttgcagacagattctttctctgtactttgttaaataaacatttgttgcagacatcttttccataaggatcttctgcactgtgcactttctgcacctctgccccccgtatacaactttccaggcctgaaggagctctacagacaggttgggtacattcctgcaacaccagcacatcatggatgtttagattcttctatggccaccctatttatttccttccactcctccatgtccttcttctccaggagggtaaagacaactttctgctcccttctactcctctggcacctttgccccgcttagttccttgaaaaacatgagccagaaatattgtgttgagggctgggatatctcaagcagcctccatcctgagactggacccttggtggagaatgaggatactcactccagtaaaacaaatcactgacacctcaagtgggagctgggaagcttcaagcagaagaggcacagcatctcccaggactgcacacagctaaagaaacagaattttctgaagaacactccattgaggtggcacctgatatcaagaggattgtgcacgcttgatagtctatgcttggaaggcctgggttgggagactgtcatctccaacctgcagtccaggctgggcatggaaggccgtgctttacagccaatctccactgtgctgatgaggggccggtgggatttcctagagaggcacctgtgatatctctggctaaacagatacagttaagagctgtcgctggggcagatcatgttaagtaacatggctgagatttgccagggtccatgtaatgccttagggtgtcagcacgcaagaaaaaaaaagaagtgactttacgtctgggactgcagaggctacaaaatgatgaaccccctaacctatgagttgtcgatattggagaatacgatgcttttgagcccagctcagatggagatctgttccacacaggtgtgtgtcatgccagtttgcagcctgggcttcctctggtgactaccccatccatctctgccactgccccagctctctgtgcccaagtgctgtccctgagccagacctctggtgggagaggccgagggggcatggagcagtgatctcaaaagccttcctctctacacaaacccaaccacgggtttctcagtgggcattctcctagctgcagccttagtttttactttggcacttttttgatgttgtaaaatgttagaactgtttgaaaaattctagagtggcttgaagcccagcaagcagtctctgttgtcttctgcttccatatgacatgggccctaaggcaggcttattggattttatgccagggattctggttttaagcagcaaactctgaggcatggcattctaataaaatcagaagaaaaactcatatgaatgggggaaaaggagaattcaaaacaataaacatgaaatatggcttaacataaagatgcttttgtttgttctggccccaaacattttcaggatttgggaacctcatcccagagctgtctctctaaaagccaaaagggcttcagtaaggatacaataagggcatagttctgcagtctgagaggtaaggacagagaccctagcttggcccctcactcacagtgtgctgaagcaagtaacttaatgccttggagactcagtttccccccataaggagatgttattgcatctgtcccttagattcctgggagggtgaaatgtgcccctctgcccgatattgtcaatgcagtagctggcaccttgaaggcaggaaacagtcttctctcccctgcccttccaggaaaggataacagtgtctggagagtactgttggcttagctggttgttgctccaggtaacagaagagggagaggcttggtctcacaaagccaccagaaatgagaccttccttaggcagccagagttccaaggtgcactattccagcggggtagcatgcaccgctaggatgcaacataagcccttcctcctgcagagcagcagcctcctccttcacaaggagcaccatagccaccctgcagaacacagctgcgtcagggcctcacagcagtgttgcaccgtgccagccacaacacagattctgaaagctgcattttacaaatcgaggattcactgctctttgtcttgtgaagtgtgacccacaatgaatggcaaccgttctttctttaagagcttccattccatgctcccaatttgaaggatatcctgacaaagggaagtagaattccccaagtggaagtgcctcgtccccttcaataaacgcgagtgaaatcaaagggctgcttctgtgctctcttcctctgtttttctcatgcagtcctcccatctgactaccttgtcacagctcttcttttcctacctgcatcctcttcaccttgttttcctttcccacacatcaggccaaggcttctagaattccttgcagcaagagctggaggacagaacctcagggaactgccctgtgggaatgcttcatgtcgtcttctacacgccctctgacctggccgctgcacacaggtctttcactctatgtgattccctggctgccccttcacctccaagagctctgaacggctttacaactaggaagtctctgaatgtgcagaacaatgagtttctctttcagcagggccttgccaccccagttgtttttattcccccctctgatatgctagagataatgatagatccaggaagtatattttcttcacactaggaggggccttgccccacaactggagacatgccattcctgtctttactgtctgttctgatgggagctcctgagagatggcaggacaggcagccttcattcctaaacacagtgtcctgcagacccacccgctccagcttatttttcacagacatatttctggaggagtagtgtttattatacctctgaaactcaaggcttctccatgcacagaaatagcctccaagaaacagccctctatacccccgagaaatgcccccaagaaacctccatgcccctgagaaatagctctcttgcacctctctattttttgaaatttcttaaatatttgccaccaagcaacagagtgaataagaggctaaaatgttccctcatttggtgacaagttcctatgcaagttttgaattatttggaataattggatttctttggcttgtgagccaaggggaatcactatcactttcttctatggtatcagaaaactccctctttcttctaagttcccctgctgcagtcttctcccccaccttcatgtgagagctacacaaggggaatttgttcacttaagtttgcagccattttgcacaccccaaagagttgaccttgatgtgaactaattgggattgcagtgggttaataacacaggttggtgaggtggaatttgcagcataaaggaaacacttgaagataagagccatttgtgctttcataagctcatccctggtgctctgaacaaaggacacaaactaataaagtcagattcatctaggggcaatctacactcgctcaccccaaactctgattcagaaaggcaaatggaaatctgccagaattcttttaaactccaacacagatctcgatttaaaaaatgacacacacaaaaccgcttggtaataagcagacctctgatgatctacagatccacagcttcgtttattgacttagagaaagtaaatggcatttcaaatacaaccttcatacttcaatagatgaggtcaccctgagaaagatgatactcagcccagcagtgggaaacctccctccagagaactgctttgatttacaaggccaaggaaggctttctcatagaagccatatacttgggctaaaatggagtaattttttttaaaaaaattaaatgtagaggttgagatagcagacaactatgaaactcttgctcaacaagagggatgacctatggaagacaggaatgctaggacctacagaactgaagggtcaaaattgacttactaccaagtttagatagctaagtaactcacatttttttcaggcattgagatcctgtgtatattgactagaagatccttgtgaatttcccaattactcttaaatagcgatcatcaaacgggtgatttctcctccaggggatttctggcaatgtctggagacatttttggttgccacaactgaggaagggggagtgctactgtcatctagtacgtggaggccaggaatgctgctcaacatcctacaatgcacaggatggcccctacaacagagaatgatcctgcccacaagatcaagcgtgccctaaagtgtcaaagaaaaccttgctcagggaaagcacacactgccacaatggtttcagctaccatgatgacaagacggaagatgtgacttctagaggtgctcttcaggatcggggaaagctaacacagcattgtcccctgggcacagtacaaatgaactgaggggtatgaggagatgaggtgtgtggtgagcactttctggagcccttgtgagaatcctgggtggctgcagtcatgatgcacccagggggaaactccatccccatgtaaggtttaaggcgactgctctctcagtctcatggcctggcacccagacttagagctggcatgttgagccctgggtgagctgcaggtgtgaactaccaacaagactgctcctgagctgaccgtcggctttgccatctgggagggtacaggctagcacttgcctctcctgggcttcctgggcatgagtcacatgtaactagataatgacgcaaatcaccgtcaacattacttaaggtttcattctaatgtcttatggaatgatagagcagaaagcaacctccgagacagcagagacaaccatgccagccccatctcagagaaagctgcagtgcggaatggtgaagggactccccctattctccacagcagatagcaacagagcagggacagaccttctggctctttgtagactactgctttaactacatgatagttagaaactataaccctcccatcaatctagttaccatgtactgacagaacaaaaagacctagctaaacctcaaaaaaaaagaagtcactggaaagcacattgtccagatggttctggtggggaacacctttgcctgcttatagctctgtgagatcctgagcttggtgagatggactgggaagtcctaacttcatttatgtcttctctccaccctgaaacgatgccaaaatgaccccaaatctcaaataaaagttggtgtctgttgctgtaaatgtacaaataacccaaagtcaaaattagggatggaagttaccattccttttgccttctgtgttttgaggtggtcgtggggaggaggaaggctttcagggacaagcagacggcgacagggatcacactgtcacctgtgtgcgccttttcttctaatggccttaaactgccaagtggctgcaactgcagcgtgctgattttaaatgcttttatggaaagcaccatccccttttcgactagcatcacttaaaataatgagttagatgcacttgtattattctgtctttcaagtggattaaattcacaggctcgctctcctccagtctcgcaagctttggcctggctgtctgaacctccagattagactgatgagcacatgccagacagcaatgaaatgcaattacccaggcaaacttttgaaggatttgagccctggggcacaggctgtttacgaaagactaaaagcaccgtttgtgctgagcaggaccagttgcctccgtcttttccagttctggatcctgcctgccactggactgcaggcaggatttctgggggcctgataacatcaggcttctgtccacacctcagcacctcggggtctttgctctgtttttcaacaagaaaatgcaagtaccaacaaaagcctattataacatctccctttgtgttcactgactgactctctctctctcattgacttatttttttgtattgtgtactaccccgaaaaaatgcagccaggaatcatcctatagctgactggctgtgtaacttctttggaaatgaacaacctttccaaaaaacaggaacttcccgtcttctttgaaaaaaaaaattaaaaagcaaaccagtctcaacagcacctctgaattaccttccccttgatttgaacaaaagaggtttcagaggaacagaggtggagggaagagaaaacaaagaatgggcaaagggaaggttgacaaggagagtgaccatggtctcccctctgctgacccagacttttttttgtttgtgtgttttagacaactgtgggtgacacagaggtgttggaatggttcttcatccattcagctgaaaattaaaatgtaattctgctaggagaatgctggggaggggagggactggggaaggttccttggcttttgtagttgctgtggaggaagcaccaagtgaagccagcaggatggcagcactgaaacgctccagggctggggttgggggtcctgaagcccccgccatagggcacagggtgggtgtgggaaagaagcttccatgaggagtgggaaaatacgagggatagcaagaaaaagagtaaacttggaaggatgggtttcagaagtgctggaaccaagaacaatctagaatgcttttagagaaggaggccacacaggggcacatctgcacaccaaggaaggaggaagaacgccactgccaggagctagcagtgagtaggggttgggatccaaggaagtggtaggtaaatcatgcactcttactctggggccgagatgtcttacaaaatgtggaaagcagggtcaggattcagaaggcagcctccgatgaggctgagcagtctttagaggaaggaagatgaaaagaaagaagctgggatgagagagtttggcctcagagagggaatgggaaagggcaggggggctcactagcttagttagcagaaggctgtgaaagtgatgagggccagaaagccaagaagcatggagacttcctaggctcctcctcatcacaaacaagaagggaaatggcccaagaaagggcaggtggtgccagccaggctctccccccaggttcccagctgggatctgggaaaggagaaggaaagaatggagaaaggaaacagccaaagggccccagcagagagttggtgctatgtaaggaaagaaattgtttagggcaggatattctgaaattaacttaaaacctaaaacaaacagttttgacttgctgtcccaggagcaaggaaaaatccttcctcaacgactcatgcacccctttctctgcagctctgggctaggttcgtgggggtcctgggaaggagagagcgttcctgcccacctggaagtctccttccaacttgttgatctcagaaccctgatgtgctctggggagaagagtgtgtagcgggtgggggcacgctcagggttgcctgcctggatggcatctcggtggtggtggttgagtttttactgtcttacagcacagatggtggaaaatcatagccatgacagttggtgaagcgtcactcaaacatgcagcctatctggtaacagcagaaggcaatgtgtggggaaatgccaaagtgacagagaccaacagatcagtcaggagtcgggaagggagtcagtctgggcctcagtgaggacaaagatgttctggaggagatggggcaggtgaggtgccctgaagaatggcaggattcggggatgtggtggggaggagaggaaggaactttctgggtaggcatccagcatggaccaaagcttgtgggcaggactggtcatgggtgttcagagatcaagcaggaagatctgcagcattcacccacctcagtgtccagcctccctcctgttcgttggcttgactttttggtcatttcagagcaagaatgagcttcggaagaatggagcaccttgtggcccagaacaaggcagggaggcatggctagagaaggagacaggaaactggtggttccatggtctccataggtatcaggcctccctggcatcagctgacctgaaatagcaacacctgcttcttcggccactttcctccaaaggtgacatattcagacaggttctaccaggagtgcagggctaagggaacctatgcagtgcagtccctggactctctgaaggccaaagtatcaacagtgagcacattgggtcttcacacgtcactcaaggtcacatagaggggattcaaactcaggctggagtgtagccagaagtccaggttgcctatgctcattgctattcaccgtctgtcactctgctgcctctgaaaagttgtccttttgtttctctgggattgtcaactgatgtacatacagagatacaagggtggctgagctacaaatgatttatactacaagaaacagactggcgcaacctcatctctggtaagtcctcagtctcaaatgaaataaacagcatatggattttccctgttgtgtcgctgaggccaaattaggagtcagcaatggggcttagtgcttaaataagttgtgtatggatgagaaggatagggctgcccattccttgtttgagtgactgctggcacctaaatgcctcccggctcaggtaagagcctacctgatcacaaacagagctgggagatttgtcgagttactcaagcccccaagacatggccactacatgtgtgagattttcttagctcttctacacaggctccttactgttggctctcgcagtaaagagtggtttttgataactctgggaagctcttttcctgactcctacactatgggcctccacgtcgtgtggtcctgcaatagaaagtcatttcagggtggctttgactaagtaatgatccttcagagcgatcatcacccttgaggggtgccagcctgtacccagaaggactcctgcccggggccgcctcatgtcagggcctcttgagaactggatttgcaaagtgtctgcagacgtaagtcctggtggcctgctctgtctgctctgatcacaggggacaggaaggctgaaccaggacagaacagtttgcggtttcatcaatgaataatatggagctggggacaaagtcccctctactttctgcggctgtcactgaaatgtcagcagtggagggaaaaccagaagagaaaacctctcactgacaggcgccctcagtgtgcaaagagctcaagtttcagtgctggggtggggtgggggctgcgcccctgcctattcaccccactcctcccctgggctgctccactcccatgatgactgggaatttatcctacaacaggccacgagctccttgttctgcagtaggaaattatccttcataagagggcaactgttagtattgtttgtttgttttttaatttccaaaagtaaggagaagtttattaaataagagcgggggaagggaggagggagaaggagagggaaagggcccgagaggcagctgaccccagcatttcccgtctccccttggcttctcccatcccccttgtcccagacccccctccttctggttctgaatgtgaaaaataagcagcctgcacctcctcgactggagatgtgtctaacaaggccctcattgtctcagacaggtgtgagattggacttgattcggggccaacacctccagtaccggagccagctctgtgagccgaaaacatgcaccagccctccagtaataccactgcagccagccagagactcaacaatttaaggcttaacacacacaacataaatcagaggaggatggaccagccgaccggcagcttcttgggcagatgcctgcagactgtctgcagatcataccctgcctgtttgggttatttgagactctttttctgtaatataaagatgagaaactgggtggagcagcgtgcagaggcacacgggtgtttgtcctgtcttgttccaacagcccctctttcgcctaagtgctgttttgaagggactgctcaggacggttcacattgctacatccaaatcctaggaatgtgtccaagctggggaggaggggaaaggaaagctgagcgctctgatatgggtggtatctgtgtgaccctgggcaagtctcttaacctctctgggctcatccatctaacaaggggtctagttttctgcgattcactcatctctaatgctcagaagttcaaagtcactgtaagaagtgcccaagtcagaggaggtcattacacttgggaggaaactcacagcaccattgaatgctgtttctgagtggatccatgtctttgagcaagaaaagtctctcctcctcatacctgttctttagaaacttgtggttctcagactgctgaggcaagcccagagctcgagcccccgggagtgtggtcatgacatggcaagagccacacgctatgggaggggaagatggagatgacaggtctgcactgctagttactgccatgctccagtccctcttcctaatcaattcttagataagtttcattgaggagggaggattaccaagtcaccaagtcttagtgaagggagggggcccagaagccacccgtcaatgcgggagcccccactctggtgcctctgaaagaagggcatttggtctctgcaaattcctgtgacattccagggtagcttttggccctgccattcgtcaccctgaccctgaattcatggacaaggacgtggccgtcacagggatgccttcatctggtcccagctctctccctctcatagccgtgtactctgttgggagcaattggcatgaagtttggcagtggcatcctgaaccgggatgacaggaccatcagtcagcaccagcctcccgcccctcctggcctcggcctgccaaagcctcgtattcccacagctgtggctccagcctctgccctgtcacactcgcacacctgtttgccatcctgcttctggcccgccagcccaagccacagcccccaagcaggcttaaagggccgggcttgtgggaggaatcggcacaggatggtatttactcaaaatcacacaggacggtgaaacttggttaaaagaaatccttttgtagctgcttcattaaaaacaccaaagaggctgaccattcacatttgttgaatgcatccaattcatgcaagtaatgggacaggtcagggttcacccttgcctgctacccacgtgggctttgtgctcaggaagtgacctgtcggtctcctgtagctggttgtccccaacagggagcagggctggggtgccggctggggctgcggagggtgggcatggctttgaggaggatatcccttccttgctgggtggggctgagtagaatgggcgtggctttgaggaggatttcccttccttgctgagtggggctgaggagggtaggtgtggctttgaggaggacttcccttccttgcatgctttaagaatccctcctccagccaggcatggtggctcatgcctgtaatctcagcactttgggaggccgaggcgggcggatcacctgtggtcaggagttcgagacgagcctggccaacatgctgaaaccccatctgtactaaaaatacaaatatatatattagctgggggtggtggcagactctgtaatcccgactctgtaatcccggctactcgggaggctgaggcaggagaatcccctgaacccgggaggtagaggttgcagtgagcctgggtgacaagagtgaaacaccgtctcaaaaaaaaaaaagcatcactcctccttagcacgaattcaaccttttaaaaatggagactcagaagcagcacatgatactgaacccaaccatgggacctagcatctccctgagatggtgtatttccagaaaaaggcagtgtgacgtacagcatggttcagtgcccaagtgaatgatccacaccaaccctagagactgttctgaggctacctctgaggcagacccgaaccagccaatgggaagagcactgggccaggagccagaaaacctggatgttaggtctgcctctagttcggaaaatcactgaaactccctgggcctcgagtgtctcatgagtaaaatatagggctttgagcaaagaagtttaaggtcctttcaactttaacagtttaccatttggtcttgtggaacagtggttatgggaaggtctcctgtttgggtttatccaaggaaacaaaactcaaatgaaaataccactaaaaccaccaatacctttatccactctggggctcccgaggaataaggagacaccgggggaattatcgcagagtagctgtgtgacttggagaggaccgatgggtacaactaactggtgatacaacaatgccgccaataagagcacataaatagcaataatagtgaaaaagaataacattgaccatttattaagtattgaaagtgtaccgggatccatgctaaatatttgataaaaatatatctcaaagactttgtgaaggattaataaatacacacaatgcttcccatgtgctgtgcatcaagtgatttctgcaggctaactcatttaatcctcacaattgtcccatgtgttaggaactattattgttacgacggtttgcagagggggagaagggacacggaggaattacagacccacattctgccttcctcataacgtgcattctgagggctgtcatctttcttctgagtctcttctgaggatgagatggaaaagatagctctatcctggctggggagagggatggacagaagaactgacttctgccttaacatctccagggtgctgtgtcttcctctgagggagccatgtgtgaccagggagaaagttcgaaaataaggacaattctttatagagccgcgaatgcattcccctcccctaccccaaggcgtgaaagaatcaaatgaggaaatcaggaagagattctggaataggaataacaagatttcccttcccttccactgaattggccatcagtaattttgcacaaattcaattttgaagtcatgcttcgtaatttgtggtaaatcatattaaattaaacagatccatgtctgggcaacggcttctctcatttaggaacatatggtggctcagagcctctcacacagcagaactataaaggctccttccaaataagcagcagagtgaggggctctggggcaaccctactggttttcctgagaatgttagttaggggtgaccattaattcacgggaactgcagtatccagaatgacagaatgttagtgttgaagacaacctggttaatcacttacatgatagatgagggactgggacttggtggtaaaggaaacagtgctgggtcacgtgaaaacaaaccagacaccacaggcaggaccttccgggcaatgcttccccctaaccatgtcatgcacctacaggtgactggtggtggggattcaatgaaccagcaacattggtctgttctataaatacgagctatcattattttattactcccttcagtaaacatgtgaaccaggcaatgtccttgtcataatcttgctgtcataactgctctgtgataacccaggtatagacacaatcacaaacaaaggctatcattttaaaacggggaagtgggtgagtctcatgcttcaaaagcttctgcattcatctttaagataccagccttgttggacgaccaacagaagcgcatcttaaaactcaggcagttatggctgttccacatagcgggtgatttacaacaaagtatagatgaagattaaccggccttgagatgagagagctaaataaaccacttagtgggcagaaaggccaagtcgagcccttgagcttgtgctgacttttacagatattttaataactttatcattatataatttgctatctgatatgtgcggagagatgcactaatggagtgagagtggccacaacagtgttataatcccgcgagacttaatcaaaccaccatgttcgtgtccctcatgtgacctgcaactccaggaagtgcaatccctagtcacattatttcttcctccctttttatcttgagatgttctttaaaaaaatcccaaagcaactggacatatgtagtccttccagtgatataaagaggaactggcacagcataagctctctgggtcttggatctggctttagaatgactcaggttgaacacataaagccgtaaggtaaagaggacatcatccatagcaggaactggcaatttacagggctgggagacttaaccgtcccagacgggtgagctcctgatactcaagttagcgctgactcagcgagggccttgaggcttgactcacagatcttccctagggatgctttgcttttatgacatcaactgaaggatcctgcagtgtcctccatacttccaggaggattgagctggacattatagtggcccaagtcttattaaacggaactgatgatgttgacttacggaggctaagattcagtgacccagttcagattgtgtggaagaaccaagacggtagaggaattaagcaccatttccattcctggtgggttttttttttttttttttttttttttttttcagatggagtttcactcttgtcacccaggctagagtacaatggcctgatctcggctcactgcaacctctgcctcccaggttcaagcgattctcctgcctcagcctcccaagtagctgggattacaggtgcccgccaccacacccagctgatttttgtatttttagtagagacggggttttgccatgttggcaggctggtctcgaactcctgacctcaggtgatccacccacctcggtctcccaaagtgctgggattaccagcatgagccactgtgcctggcccctggtgtgttttaaagctcaagtttcatgccaccccataggtgttaggtgacatgagacacacaggtcagaatcgccatctcctcttccctctgcccatactgattccctccaggaaagaaagtagggaatttcatctttaagaacaagaatccccttccaaaaaggttaattcccataacaggatctacggagatcagaattggaagacacttttcaaaatcttgaaaccctattgagaaagttctaaaccctaaaaatgaccctaaggttgtatggaataatgatggtgcccaggattgtggcatcctgtgtctggaggcagtggctgtcttttctgcccaatctttcctatccatgattcagtcaacatttagtcaaacattcagtcaagcatttagtgccattgttctattttttcttaaaacagaaaatagtctattccatgccatttaggggagcgtgaactggctaaaactcaacctgaagactttccatagcttgctaatcagaaatcacctgaattagaggtggtacattcttcccctatcaattctcaggagtgcaaagagagacaaaaaataaacatggttggccaatgtttgtttttagggtgagttctatactatttttctattattattttgctttatttactgtggttggtaactgaatctctaacatcaaaacatgagatgttctgccagaaagagattacagaagaaaagcctatgaaaagaaactgggtttgtcagtgaagattttatttacaggagttttgcaatcggtatctttaatctccataacaattgggctattctactgctttgaaggcaattgttcaataatgagaaggtccctgtgaggctaaggcttggaaggaagaatgtaacagggctggtgacaattgaggcaggtgaaaccctctgcctctgtcaatttcccctaaaggtcagggtggggtgttctgagggccagagagaaataagcaaagacacaggtaatgaaagtccctccgcatcatttaaatcacaaatactggattttaaagagccctaaaataactgaattcgagtgggcctgaatttctgttccataaggcaaggaaaaatcatgtagatgagtaaaaccaactcagtctggagaactatgcctaataagaaaacccaagcagtagctttctaagtagagctgtttttcatattagcatatattgtttgttcttctctcaatacaaacttgtggtaaactttgatactacttcatgactacagtaaaagtttcttttttaaatgtccaaatttgaaagactatcttcaggcgatttgtaaatcaccatcctttagaaatgggtgtgtagtcaacaatgcctggcaatcaagtcacttttttaaaaggcagcttgcttcaaaacaacagtgacatgcctggctttgggaggtcaaattcttgagtccatcccaactgtctggctttggtcatcatgtcatcttttgttcccatttttctgttcctaccatctaagctgtcatgagcttttggaggctaggacaagaggcacctgggcctcctgtttccccatctggcactgctcccgggacacagggaagagagctctttctctatcactgtcaggacctctgattccatcggtataggtgctctagaaaatattaaggaaatatctgatctcatctaaaaaaaatcatacatttttctggctgggaaataaaaatactatgatgttgcgttcaaacaaatgatggactgaggttatagtaacacgattggggcatttgtgcatgagatgttcagttcacatttacctgtctaccatgtttgttctgggggatggacttgggagagttatctctggactcacctgctgtgcctggtcaatggtctgatgtcccctgtcttttgtacaaagatacagcagtttgaacggtggctccagaaccatttcctcacccccagaactgtgaatgtgaccttatttggaaaagggcctttgaagctataattaagtgaaggattttgagttcatcatgaattacctgggtgggtctaaatatagtaacatgtatccttagacaaaagagatgacacaaaggaggccatataaagagggaagaagaagttggaatgatacagtctgatacagtcacaagccaaggaatgccaccagtggctggaagagataaggaagtatcctcccctagaggcttcagagaatgtatggtcttgccaacactttgattttggacttctggcctccagaactaagagagaatacatttctgttgttttaagccaccaagtttgtggttatttgttaaaacagccacaggaaactaatatacttgtgctgtggtttgattatgtccctcaaaagttcacatgttggaaacttagatcccactgtggtggtgttgatgaggcctttgcagggagcaaacgggtcatgaggattctgccctcataaatggattaatgccataatcatgtgagtgggttattggtgaagtgcctttgttataaaagcaagctctcttgcacatgctttcttgtgccccttgctttctgccttgggttaatgcagcaaggaccccaccagatgccagcaccatgctcttggacttccctgcctccagaaccatatgaaataaatttcttttgttttctttctttctttttttttttttttttttttgagacagaatctcactctgtcacccaggctggagtgcagtaacatgatctcagctcactgcaacctccacctccccggctcaagcgattctcctgcctcagcctcccgggtaactaggactcaggtgtgtgccaccatgcccagctaattttttttttttgtatttttagtagagatgggggtttcaccatgttggccagcctgctctcgaactcccgacctcaagtgatctgcctgccttggcctcccaaagtggtgggattacaggcatgagccactgtgcccagctgtgaattaaatttattttctttataaattacccagtctcaggcatttaacaaaagaactaagacagaaagttggtaccaagatgtggggttgttactacaacaaatacctgaaagtgtgtaagtggctttggaactgtataaccgtgaaggctgaacaagtttggaggagcaggctagaaaaaagcctgcattgccaagaacggttctgccattaggggcaattctggtgagggctctgaaagaagaccttagaactaggggaagtctaaatcttcgtagagattacttaagtgattacttaagtgtatgtgaccagagtgctggtagaatgctggtaaaggccattctgatgaggctgcagatagaaatgaggaacaaggtattggaaactggagtaaaggccatatttataaaatataaggttgcaaagagctgggtgaaattgtgtctgtgtcctaggacttaatggaatgcagaacttaagagggatgaactaggatatttgtggaagaaatacttaagcagcaaagcattgaggctgctgtgtggctacttttaactacatatagtgagatgtgatagcaaaagaatgacttaaagatgaaatttgcaattaaaagagaagcagagtggaaagatttggaaaattcgcagcctggccatgtaaagagtgaaagtgtatttggaagagagtactaagggtgtggccaagcaaccatttgccaaagagattagtatgaatgcgaggaagccagattctgttcatcaaaacaatgggagaaagaccccgaaaagcatttcagagatcttcaagttgctcctcccatcataggcccagagctctaggagggtagaatgattttaggggacaggcctggggcacccttcatgggctcactgcccagggctgcctctagtctctgcttcctgcatcctggtgcagcacaccttggccaccccagctgtggcttcagtgggcctaggtatacctaggctgccattctgaagggcacaagcagtatgccttgatggtctctatgtggtgctaattccgtaggcatgcagaatacatgctgtggaagcatggcttcctccacctagattacgaaggatgccacagactgcctagaagctcaggccaagacctaccacaggggaataccactgcagacagtacctagcagggcaatgttgaacagaaatgtgaggttgaagctgccacaaagagtccccactaaggctgtgcctaatggagacacagaattggggctatccctgagaacccagaactgcagagccaccagtgtgcaactctagcctggtaatgctgcagacacaagacttcaacgtgagagaggtgaagtttgggctgagcccagcaaaactgtaggggcagggctgcccaaggccttgggggcctagtcttagccccattgtatccagaaggcagaacatggagtcaaaggagattattctccagttttaagacttaatattgtttaccctgttggattttgaacttatatgggaccagttacccctattttcttgcctgtttttctcttttggagtaggaatttctaccttgtgtctgtcccaccattatattttggaagtattatagtagacttgtttttgatttcacaaagctaatggaatttgctttaaatgtttccttgcatctcacccatatctggtttagacaagactttggactttcgacttttgagttaatgctggaaagagttaagactttggggaccactgggatggaataaatgtatttttaaaatgagaatcacatgaatttggggaggtcagaggtggaatgctatggtttgaatgtgtcttctcaaaagttcatatgttggaaacctggttgccatcatggcaatgttgagaggtggggcctttgggaggtgattgagtcataagggctccatcctcacaaatgaattcatgctaccattgagggagtaagttagttatcatggaggtggctttgtcataaaagtgagctctctgacagatgctctctgcccttccacctatctgccatgggatgactctcagcagatgatggcaccttgctcttggacttcccagcctccatagccatgagccgaataaacttttctttatatattacccagtctataatatataagactacgacaacttgatattattgatgttgatcataacagctaacagtttttgagtgttaaccatgggctggctctaatgtccactgctttatgtttcacagtggtcctaggatctgctagtataattattactcgtcttttgcagataagaaaactaaggctttaaaaggttaagtaacttgccaaaagtcctatagtgaatgtggtagaaactaaggtagtctgcctgttgagccctcattctttcttagccactatgatctgctatctttcttggctattagattcccagctcaagccttctgatatgtagccatcaatatcaaatacatgctccaactacaactttgctgaaactattaatcttccaaatgaaaccttttagtgcatgggtgtgctggcctacatatttacaagcataaggggaaagttcagaacatatgcagtctacagaagaaatatttcatcactaagatcaagccctgcagtgaatctctgcagtcatcccactggttttcatttcttctctctctctcccttctttcctttaattatttttatttattcctgtgaacacctgattcaggcttgttgtcggggtaagattataatgctatagacctggaaaggctctcataccctactacaccttgttaaaagctatttttaaatgaaatcattcacctgtcatgtttatagcctattatataaattaatttctcacattctgaatatgttactttgtgtaaccattaaatgaccatttatagattcacatatgaggatttctggtgtttgattgtagcctccactttcaaggtaatcaaatagtccctactccctttgttttcaaacttcaaattgctagaagagtaaggaagagagggaaggagagggagagagaaaggaaagcaatgcaatgcagttggatattttacctccaaggctggaaagaggatttatctccttctcctacaggaaggtggaaaggttttcttccttttgtctatccagatgataaagagagaatcagacggacttaaataactctatacaactgagaaacagggtcatttcagtatctcagagttttgcagacagcagcaccagaatatagtccttcctaagtaactttaattttgggggaaaataattagcaagacagaagttacttggaatactaaaaatcaagagatgatttgagaggtcagggacccctcttggccatatggaacactcaaagtgaggcacgcatactcataaaagtggattagatgttgactgggtttggatgataagcacttggtcccaatgaacttcaaaagtaggaaggcaatggccccaataaagtaaacagagtggctggtaagccttctccctgctcatataccccctctttcactcttatttagagattcattattctgagttttcttttctcccaaactttataaacaaatgcacatgtaccaaaggagacagtttattaaggtgcccaccacacagcctggccccaaaattcttcttattatcaacatctaattataatagaacatgttcaatacaagaatgccaagtgagtggatagcccaacactttttccatccctcctttggtgattgggattcttctcgacactggtcagccctgtagtaaatcgatccttgacccaagagtgcacgcccagggaacggccatcccacttgcactggctttgtagcaaggaaggtctgggtttgcgtccaagttcatcacttacaatctttgagatactgggcaatttttaacctctgaatttcgatttctctgtctataaatgataccacaggattgttgagggaatggaataatatgtacaaatgtctgacccacgtcaaaatagctcacaactggtccagttaaagagttaaatcttcttcctacatgcttatgacaaccagcatgcagaagaacaacaaaatgggcttcctagtttatctaggtttcagttttctgtaccagcatctattactccatcctcatattcccagaaaggaggaaattacgacaccttaaatgtgatacatcatatttggtcaatcaggggtgaaattttaaaatcactcactcgggttgcccaaacccatctctaggtgggagttgtgactgaacaggcatcggtaccactagctctagaatctgccctgttctatcttttgaaataaattaaaaaagaattctaagactcgatcgtagaagttaatgatggtgtcctgactgggagaaacgtgtagcccaagggtctactcatgacaaaatggctttctattctatttcatgacaaaatggctttaccagtttaagacctggtaaaataggaagttgaaataaacctcagccctttaatagttaagaccccaacaaataaacagtggtttagtggcatgacaacttgccccctctcaatctgtaccgtgcttcagataatttgagatgtctattttgagtgaccctccagcacatgtgattctaggtaagtattggtgctattctatatcagtattttcttgctgacagagtcagaggagctggcataacccttctgacaaagtcctagcaaggtagggttcctgagcctttctataaatcccggcaagctcgccaaacccccggttactgacatttctgtaaagctgaaaaacattcatgcatctggacagcaccactgtggaactactctgacaaattggatatttttctgaaaactaccactgccatttcaaagaaagccagaaacacatgctgtatttcttaaagtatcttcgtaaatataacatagaaatttcagggctgagcctggaaaataagcattttcctactgtcaagaacaaactgaaggtcttggctgaacaagacttgcatattatacctgttaactttccaatttcaagagaaaaagcccaagggtctactcaaaacatgattagcgtaaaacagcgttttcttataggaaagaaagaacaaaaggaaaaggaaaagttgtttcacatgaaaatattctggatacttattttttaaaagttgttcctaaaattttacaagtgaagtactgaatatcaaattcatattttggaaagaaagaacaccagcaatatagttcacacattctttagagtagcaaccaagcccgtaggaactctaaaagcgagttatgatttcttaaatgttgcagaagtaaaagttttcaagaggaacaaaaaaggggcgatgcttagtgttaaacctgatactctactaagcatataggtctccaaagagctgacgaatgcccatcacacggtccacaataatgcttttgcccaggagcttcagaggatgagaactcaatgtgcaacttccccccatttttttgtttttgttgttaaagaggcatatctgatgaagaaggaaatcagattagattcactcttcaccaagaaacagagcaactcaatggtgacaatatcaattttcccccatgtggctgaattttccattgcctttaaaaatgcttaagactttttgttcccatatcagcagaaaaaggcaaatcccttaatcaacctagtagtataaatggccagttaggcaacgagagactaagaaaacagtcttccttttgattttacacatgaatagatgatgtgaattagttttctgaagattatgtgaattagtttaaatgaccttaaaggcaagatgaaagaatctccttgagagttgtatcctctttggaagcaaagtattgttttgccccaagcccatctcgctcactgaacataccatttgacttaatttaccatatacgcttgtattttggaatttaaaaaaaatcaatgtacacattttaaatcattattaatgattattatgtaacaggaaaccagtggtttcatggatcctcttcctaaatacacctaaatgaacctatagatgacaggcagccccccaaaacatcaagctttaggtttctgtttgtttacaaaagggttactccacagacaggccacttagctgtgtgcatagtatcttctggaaagatttatttggaaattttccaatcaagtagaagaaccttccccagaaacctaacagtgagagctaatggcatgggctgtcaagctccatgggagacagtgggcatgccttttgagaacccatgtttttgtttgtttgtttgtttgttttttgagatggagtctcgctctgttgcccaggctggagtgcagtggtgcaatctcggcttactgcaacctccaacctcccgggttcacaccattctcctgcctcagcctcctgagtagctgggactacaggcacccgccaccatgcctgcctaattttttgtatttttagtagagttggggtttcaccatgttagccaggatggtctccatctcctgacctcgtgatccgcccgccttggcctcccaaagtgctgggattacacgtgtgagccaccgcgcccggcctgagaacccatgtttgaacccaaaatagagagctactggcctggaaacccaaaggaacagatgatatttgtacatcccacaatacaactcacatacagaaaatgcctggggaagctaattcctgctgtccgagaggggcaaagagctaccacatcgattgctggccacctgcccttttccccagatgtgttgcttatcttttccttaacaagcctgctactttgagaaagaaatattactgtaaaccatatcacacacagctgcatcctgcatggcacagagaaaagtctgcattttggatttttgaaacggtatcacagagcaaacagtcattgacgtcactggtctacagtgtaaatgaacttcttgtattatctaatttggcacagtgggccttaggcaattattgcatcttacagcgctttagtaattgccagctagccccatgggctggggggacctgcattctctattgatttgcaaataacacccttgatgtgatgacatccatacatttcaactatttcttaataataaaaaaacactagatacaaaacccacaaataatctggcaatagcgagaacttgaaacatcccatcttcactttgcttgacgtgtgtgtgtgtgtgtgtctgcgtgtgtgtcttcaagcctaatgggtaggtaaaaaaatagcatagccaaagctaactcttaaaaaattcaagagagctatctatccaatatggatatccatacccagagctcctcgtatcctctgtagcagtgcttttccttgtggggatctggttacaatgcagatctgactcggtgggtctggggtgggtggggcccaagactctgcatttccaacagctcccaggtggtgctgttggttcgaggcctttctctgagcatcaaggggaaaccccagttggtctgggaaggtgtgtgcacatgggggccagttgtgggtggtggcccaggtgcaggagaggcgggcagtgggctccatctggtacttaccctgcatctgactctgaggctgagggttaaaggcagtggagtggttcagggaggcacgagggttgggcgtgggggctgggtggtgtgggctgaccctcatggctgtgcgccgcagctgctccagttcactgagccgctcggaaaaggacaagctcccgggcttggtctgatcatctagtttctgccgatgtcctattgtggggagcagggaggggaggggatggggggagggaaggagggagggaagagatcagaaaaagtattgtggatttcctaaaactggggcttttcttgtctttcccctctctctcccctcaccccaacatagactcgctagagatatgccagctgaatttggggccactgtcctctcagcagaatgggccccctttcaccgcctcggccacagagtgctcccccagtctgggccttggcaccctccccaaccctctacacccacttccaatgggcacaactcactgagatacagaacttggcggtggtggtgatgccgggagggaaagaggcgcattaattgttggcacatggccacatgccaggggctatgctgtggcagccaggaaaggtggcctcccaggggcatcagaacggctgttccttactgcaaacccagccactggcacgttttagaggcggcaaagtgggccccgcagcttagtggtagggccccttccaagaggaaatgaggcgtggctgcaaacccacagcctctggggaggtcccatttccaggtacacgcagggcatcctcagcccctcagcccctctccctctccctctcctcacaggcttttcacaagcattccttcttccctgaagccgactcccccatgtacccctaaggaggagttgacaggaaggcctcgcctgtgtcttgtccaatattcccagcagaataggcccactggagcccagaggtagctacagcctatctggtgagcttccccagggggctcaggactggtgggatgggatgatgggcccctcagtgtctatatagggtgggatggtgggcccctcagtgtctatatagatagcaagtgtcctcatcatgctcttcaccaaaacaaccgtcaccaggaagcagcaagcagaggccactcatgggggactggggcctacggttttctcaaaatgtccttaaaccagagccagtcctgtcgtgcaaagctgaggctccaaggtagggaggtagccacaggaggcctgggccattcatttctcttttaaagacaatggcctcctgctgcttcctcagccttatggttccaataaagagtccttgatcgattgcacaacctctgttccctattgccaaatgtccccaaagccagactgagaaacagcctgcccgctgcccccataaagtgctatttcacatgccctgacccaatcctagactagaaagaggcccccttgattccactcccgcagcctggggtaagagcagaccacgagaagtgcactgtagtccagctcccaatggctacaattataaaattaaatggtataacttgcatgatggctgcaaatctccatggctggccatttcttcctgctgccaggccccttggcacagttgacattgtctcaaattccagaccagaaaaaaagggcccactatattgcagtgattttatcattaacgagacctgtttggctccaaaatgaggaaaaacacttaagcataatatttatgtagttcaaatgcaatggcccctcttgtcatgtgtcaccaaggcaaatctggactctgattcagcgctccagcccacaacaggagacttgaacgcaaacagcctgagtcacgcaggctcagcatgcatgtgggaggcctgttcttggctgcgtattttaagcaccggctttgtggatgaaaggccatggggccaggtcttgcagcaacccccatcatccctttccctcagaagtatgaaaatgtcttttttctagagcgctctgtgttggtcagccatggtgtgactcagtgcctctggatgaagccttccttagctcctccctcctcttatctctgccatagatccttggcttcctgatgatcaaactgaaaaatctgcagttttcttgcagaaaaacaaacaattccaatggaacaaccattcaaaacataataactcagccctttaacctcctaccacagtctaatgcctggcattacgagttggggtaaagaagaaggcaggaacaatgattgtggagagctctatctgcctcagaaataatgccagtcggcaaaggctgccggcaggttttgtgctcatttcaaaacttcacattcctcaggcacttagtggcatttttgaagaacactgtgtcaaggacagtgggtgacccaggagagtgatgtgagcgaggtcattctgaatacacagcacttgacgtggtagagtctacagccacagcttggaaaaacagctcttggcagttgtgtctctcttagccagcaagcgtggggacctgtgccacggagacacccaacaggaatcatcattccaggtaagccagtcctgtggtcaggcacaacgtgaggtattttttgtttgtttgtttctttgttttttattttaattagtccccctcattactatatacttagaaatgagagctttaacttgtgagcaatttctataccagctgatacctgccaaaattgtagtcatttatagagattaactgatgactgtctgctttagcagaagtgttcaggcataactctcagagaaaacaattcttcactctaagctgttttctaagccctgggagtctcagggctgagtttaatgctggaggattggggaagagcccattccactctccccacgtgtgttcctgggagtcagtaggaacgttattgccttggtaggggtcttgaccctcaggctcacaatggtgctggagagctgtgacaccaaggcacaggggaaatgagaagcattatcatattcagggtgtggtttggatgcacttacaagctagatcgaaggaacatctaattcttactttctgaaaccatcagacctcatgtgccaaatagcaatattttgcatgaaatataggaacttccgatataaactttcaagctggggaaaatgaatactttatgtcttcagtttcctgtatctgtgttcagttaaaaggctcatttgccccccgaatgttaaatagaggagtatggaaaatgtctactatccaattcacttttcttctttctcactgagtaccgggctttagagggcaacagggaattcgaccctgggtcaagcccttgggtagaaccaggatgcagctctgaacacctgcatgctggcagcttggcttcttcagcatgtttggaatcaactgtgaatgtttacagggcggtgctttaaagtagtgggcacatcaagatttcaccctgggacatcttaatcttaagcagagttgaaaaaggtcctaaattcttctagtaccattttctcatttttgaaaaaaatgaaagtacttgcttggaattttattatgtatgcagagtcataaaaatccaaaaaaggggaaaaaattgtatataataaaaataagtcaatgccgtttgcaaaattttacttcattccaaaggcattcctattgttttcggggttggctgctcattaggccatccttaaatgttatgatattttgtgacggatagtgagaccagctttcacttttctgccatacaaaataaactgagcaggtatgcatatctcgttgataaccgagctgcctttttcaagacaccattgtgatctgtggctgtaagtaacataaatgtaatatatgatcttccattaaagaaaccagataaggttaaattgccaccgtttcttggaaaattttggttagatagaataaagaattttctggcagtcaacaacatattagtctatgtttccgatatgggtttactagttttcttgatagattcttagcagaaaaatgaggaaggtatatactcagaagactgtcatgatgagccgttgagccaaatctatgcaaaagcataataccaaaaagatatatttctctctgtatatacatgtataaaattgtggttcttctaaaagcatataagaattttatatagtcaattttaaaaggatatctgtatttcagaagatgttggccagtcaattggatactcactacatgaatctggatataaaaatatggggttttcttcctttgatttgctactgttttatgacaatggaaaagaaatcaatgtgtgtagagaacagcttacttttcctggtatcacagtctaacctttaggttgcagggtcattaggatttcaaagtgacagtactgaatgtgactcttcctgaagccccttgcagatggtaaaataaatctccctaattgcaaacctaaccatatgctggctaatttaatgttgggaaatattcttcaatattatttaccataccacatgtatattatatatactatataatataaactatataatggtatatagtatgtcagtatacattctaattcatattatatatgcatgcttatatattgtccagtgctacgtaactatgggtagcctcactttcccccaccccaatttcttctcatatcgttaagctaagacaacaccacaaggttggagtacttcagaactggagaatggccacagaaatcagccttggtttttaactaatgtgtgggaagtgaggttcagagaggttatgtcatttgcccaatctcacacggccagttacaggaagagggcaggtctgaaaacacacacactctcaacacccaccgacacacacactcggaatgtacactcagtgcacctagaaattcaacacccacggacacacacactcagatatgtacactcagtgcacctagaaattcaacactcaccgacacacacactcgggatgtacactcagtgtgcctagaaattcaacacccaccgacacacacactcgggatgtacactcagtgcacctagaaatacacatttctgtgaactcaaagcgaacagggtggagaagtgcacaatgcttcatagttttagatctcagagacacgaaagcacttgaacttttgcattctgcctcaaccatctcacttctgctcccagtgtgtgtgtagaatcagaagacagccccagccacactgtgacctgcaggctgtgaggctgtgtttcacctgcttgagtgggcaatggaattacctgggcattctagtttggtaggttggtctagggtgaagggcctgagaatttggagttctaataaggtcccaggtgatgctgaggctgccgatacagggagcacgctgggaatatctgcatgagagggagagctcctcctgatactcaagcttccaatgtgcattactacttcccttctcctgcctgcttctgatttgctgtgtgctggggagaaacacgcgaactaaatatgcctgaactgtgtttagactgtgttcatgagcaatgactgacggcctccttttggtgataactatttggccgtcttttcatttttttaactcttcaatacacacagagcagctgaaaatgcccaaactctgccctgcagataggccggtgtgtgaccgtctctgtctcctacaataactgggcacattctgtcagagtcactgtcatgataatcagtctgattgctaaggtgaaccccagattctcaagtaggaagtaatttctgctgtgccatctatagaaagactttggggaatggcagggaagggttacatggaacctttattccgttccacaaatgcagcagttaagttctctgagtgcccacaggaccgggtgttaatgcagatgccacaatcctcctcccctctagagaaacaacatggtcccagggaaacgtgaatgctagagtaggcgttaagaattctccattctaaatctgcttttctaccaacctttgctgtggacaagaacaagtctcttcatcactgaggctccgtatctggaagcctggaattaagagactaagaaggattactccaagggactctaaaagcatccacaacaattacatctgctgccattatctactcaactggttctaagcacggtctttcttgaacaacttctaatgaggttacgactttcaaagttttcccttttgtcttttttcaggcagacacctggctgcgggagccactgccaagtctagctgtcaggttggtctcagagctctgtcttgatccccaccaggtcgcccagcctgcgatcccacctggcctgctctatctttctgtgtgctgggggtcagcagctttgcacgaggtgtcctaagaattcactctccctctgcctccagctgtttcatcagtgaccctttggacagttagttatgagtgaccttggacttcagtattcaaaggtgccctcctctctcccttaagccttcacagagcctttcgtgctaccctactgactgggacattccattctgctttcacccctccccctctaccatcccaaggctgagtccagagggagtgggacattaaacacaccttaaaatttgctaggaagttgtcagaggctgcacctgggaagaaagccactctgcggaacactcatccaggctctcatttcccagcttcttgtctgggttggaaaacaatgagacatctgccctgaatgcccaccttttccatcagtggcagtaggcacataagtcttaggtgagtacctgtcacccaccccgcccacactccctgtgcaggcccctgttcctctagctcatgcccctaagcctcttagaggtggatgaatcctggcaagtcccctaggatacctccacttcctaggaatcccttttacccactcagcgatttctagaggggtgatgctttagccccagagaatcaccagcaggaatagcagagcctttggtcggaaagagcttttgtactcttgtgggtggtaacaggaaagcaagcactcactgggtccacctgtgtatggggctttcctactctgggccttcccgaaccatggtcctacagtggcctctcaggtgacatgaagtacaggtcatgtcacctgaggtcaggtggcattttcttaagcctgttttctaaggcaaatgcctcctacttgaaactagaaggcagataggttgagctcccctctttgctccggcagcagtggccaccttgctcttgcccctgtgtcactgccctggggcctttgcacttactgtttcctctgctcaggaagctcttccctgagatccctgtggacctgatccctcccacccttcaagtatttgctgaaatgtcatcttctccctgaggagttcctggagatccccttttaagttgcagactatcccacatccagccagtccctagccctttggcttaggttttctccatagcacatgttaatgttatccagggtctgtctgcacccatgggactgtaaagtctacaaagacagggattttgtattttttctgcacagccatgtctccagcacctataaaaccaactggagcctaggaggctcactaatgttggctgaatgaatgaatgagtactcaggtccttcatgattggtgctgtccaatcaccctccactaggttgtgggaaagcagaaatcatttcaggtgaaggaagttgtaattaaagttttcagctgaaatgtaactacagaaaaacttcttgttgagaaaaaatacaatatcataactgagcagtttcatgagaattgtctcattagaagttgaatcagtccgggcctgatggctcatcccagcactctgggaggccgacacaggcgggtcacttgaggtcaggagttcaagaccagcctggccaacattgtgaaaccccatctccactaaaaatataaaaaaattagccaagcatggtggcgcgcacctgtagtcccagctacttgggagactgaggcaggagaatctcttgaacccaggaggtagaggctgtagtaagccaagatcgctccactgcactccagactgggtgacagagggagacctctccaaaaaaaaaaaaaaaaaaaaaaattaaatcaatcaggaaaactcatttattttcatagtgaaaaatcaaaaagaataggtcaaaggctcttttgctgagttgagagtggcactctgacataagcaaagtccaccagcttctcctgtttctttgtagtgagtaccctctcacacgcacacacagagagacatacaaaaacacagatggcacacatgcacacacatacacacatacagacatgcatggacaaacatacacacggacacagccatacacataaaaacatacagatgcagctgggcgcggtggctcatgcctgtaatcccagcactttgggaggctgaggcggacagatcatgaggtcaggagttcgagagcagcctagccagtatggtgaaaccccatctctactaaaaaatgcaaaaagtagccgggcatggtggcacgtgcctgtagtcccagttacaagtaagtggctgaggcagaagaattgctagaacccaggaggcagaagttgcaatgagccaagatcatgccagtgcactccagcctgagcgacagagcgagactctgtctcaaaaaacaaaacaaaacaaaatatagatacacatggacacacatgtataaacacacatacagacacacatggacatatacacacaaacacaggcatgcatgtaaacacatacagacacacacatacacagacacctggacacacacacagatataaaacacacatggggatacacacatataaatacacacagacacatgtacatacgtcacacagacacatatattaagacatgcacagacacacatacacatacagacacaaaccaggacagacacatatatacagacgcacacacacatatacatatatcacacagggacacacatgcatatacacacaggcagatatacagacatggggacacatatatacaaacatacacacatactgacatacacacatatacacatacatacatatacatccatcacacatccatacatccactcacacacacacaccgttctgtgatcgccctcaggacatgggccaagacaagtgtagcaagcaacagtcaatggacaggaaaggctggccaacgccaaggcaagatcaacaaccaatacaacttcaagccagagacgcacacaggcctgcccctccccagcccccctgcaccatgcgcccaagactcacgggacaaaaacccaaacaaaactctgctccctgagtccagggctcattgccacgagcagtggagtttttcgcccactcacatgagactcgggcctctcctaaaagcagagcactcaaaatctaaatctgccatccccggtcgccagggctcactgtccatttctgtctggtgactaaggaggtaacttgagctcagggcagagaagccacctgctggcttttgctcttgaccagaggtagccctctgtgggggaagtggaggcagtttcttaagaagggtgcagacagctcccaaattcaaggtttttcttcttctaccagcctataatcccaaatattagcaaccctccctaggttaaggtcttatctcaaggaaacccccagttacagcgtaactgaaaagtaaccagagagtggtaaccaccagtgacatggatttgttgatcagagtagctcctgcccagggacagactctaaagagaaggcgacttgcagaagagaaagaaagtattggtggcgggtggcgcactatggagatatgagcactgactcacagaacgctgcctggagcttctgacatggctttggagttcaggcatcagcagggctagtcctggggtagacaggcaagacctgggggccaggagaagaagatccaggaggcgcacacacactgcttgcgtgagcatgttaccagcactgaggctctccacactggcctcctaacctccctgcaggaatctcagttcccctcccgcagcagcagatctcatacataatgggcagagacactgagcatgtttggacaggaccgaggtaaaggcagggcccttccaaggttgggtgatgcctccataaatgctggacaaataaatgaatgagtgagtgagtgaatgaatgaatgagtgagcccctttcctggactagatttattctggaatgctcatccagcagtgtggaggatgatctctcctcctctgtacttctaaaaagagggaaggaaattccctcctatttctaaaagccctgccccctgggcctcggggactttcccaacagcaggggaacagcatctgactctgacgctctctcctgtcacagacgccaactgaggttctaggctggccttgcaaagcccttggacagatggctgagcaggtcctggctggtacagaaggacagggtaccctggccactcacagctcctgagtactcactagtacaaaagccaaccgcagcaagttgttttgaacagaacgttgaccctccctcacaaataaggcttccggttgtttgtgtcatgacagcctcattcaggcatcaggctcacttctatgcactgttgtccacgtgccagaagcagccacctgctgagaagggcatctgtgaggagggagacctcttctaaagttacctgaatgggcaagtggctgtttgcctagactcccacagagcacagcatggtgatgaagatgctggtcccactgtctgccaggtaacattgggagggaaagttctgtttattccaagacactagtgcctcctattcaccttggtgaccacatttgagccagttaggaaatgaaggaagggaaggttccatccttgccagggatggagacagggatggagggcaaggatggacgcccaggacagccttctgtccggcaacattccccctcctcaatcctttcccgattcgaaaggtacacaacttccccctggcctgtctaccttgagtctctgcctatggctgcctggcctggtgagaccagcctcccagctcctctgtgttacgcaggcaataggagagctgccttttcaacaactgttttgaactttcctctccttttaactccttcaacagtccctcttctgtgtgaacactctggtgtgtgaaagcaagacctcagctcagggagacagccctcataaactgccgcagattaccctgtcttttcccagccggagggggaccccgccccactcccttcccagtctcttccccacccccaacttttttttttaaccacttctgcttccttcattttctcagcagctgcagcggagagatatagtaaagctactgtataggattttgaaagcagggcctccaagagctttccaaactccacacaagccagttattctctgccttgttttctttggcttcaggttagtaacacagaatgagtcaaacagtattaactttcaatagggaagtggtgtggtcaaccaaagctgtttgcggctagattatgaagataggtagggcaggtaatgcagaatagcccataatactgtgaggaggcagaggagggaggcggccccactcagaaacactccaacaattaagtcaacagaacttacaccatctttttttagttggctgaggaattaacaccaaggtctctgaccagccagctttgggaagttggccataatggggcttggacaattgagtactttgtgggtttaaggatgtctttttttttttttttttttttcaaatgttgccaaagtcatgggaactctagttaggaagatttcccctacttagagcatgtcactctggcgtggaccttcattcatctctttccccggcctggggttgatccattctcccttcttcccccttctcctgccctgcccccaccttctcagtcacaatctttgtcttcccagtttggcaggacatcccaggggcccctgggctttccttcctgaggttagaagatggtgctttgaaagaacaattgctcctacaaccatcaaatcaaacttttagaagctgataaagaccttaaaaatcattcaatctcctcttctttctccttctgtagatgaggaatctgagggtctaagaggagacatgagctgctgagattgactgagctagcagggccagacatagactccacgggcaggcccgcagtctttccaccaggtcaggccactccctcgcccagggctcaagattccttttagagttcaacagagcagctcccgagaacagaccagccctcaagactcaaatttcagtggtttccagttctttctccctgcactcagctacctatttattttgagactggctgaatcacccgaagaatagaacgggtttctctgaagctgctcccggcagcatgtcagcaaatgaacaggacagcgagctggcctctggagccttggaagattctcacctccaagcagctgcagtttttgactcgtcctgggaaactggcactgagactcaggggtgtaacatttcacctccctgaaatcaaatccagaaatctcaggcgagcagcatatataaaaagccacaggggaaaaaaggaatacggactcagcaactcttaggtgctctgagcctcttcccaagccttctggttctgtgagcatttcattgaaagaaaatggaataacagagttttagaagaaaaactgtatttggtcttgcaagagaaaagtatattcatataaaactcagttctcaactatttgccaaggttacttcttttgtttccaacatttaaaaagggtatctagttgtaggtagagaaaacattaagatatgtgaatggaaaaaggtaaaatttctaaaagtatggattcacagtggggtctgatttaaatgtttaaattttttctctttaatttcttctcaccaatcctgaaagacacgacgagataatatctactttcaataaatcaattaattttatttaaaatccctaagattttaatatagtacatgcaaaacaataatagattttctattttttaattatctaattatatttatattatctaattgacagactacttaaaaagcacattgatatatattatctcaatgtgtcctcaagaaccctgtgcagtaggcagaactcatagtattattcccatcttatagatgacccaggggaagcttctagatgctcagagctttgcaggtcacacaacagcataggtgcttcatgttaagaagcagaactgcattttgataaaacctttaattggaaaaagatcacctctccctcaaggaagtagggcaacatggttgacagggttatgtttcaatgaggaatacatttgttgaagccagttcagtgatgcagtaattggaattaataataggtagtatggaaggaaaagagaaaaagcccttattgtactgtattgtgagggccaaatctgccaagcttttttttttcttctttttttttaagtacttggcaatggtaaatatttggcccccacttgaacagaattccatttgtttcctctcataaggtctttgggacatggtcaaggggcctacccgtctagagcatgtgctttaataatagcagctaatatttaaggaacacttctgtgcccagcacggtgctatgccctaacatgaattattttattcaatccgcacaataatccccaacagagggatatcatactcctggttttatacccaaggaggctgagggtggggaggttaatctgatcccgaaggggaggccaggctgaatcaggaagccagctctggagcttcgccatcagccactgctccagctcgcctttcaggctatctcttttaatcctcacatcccctagcaagagaggtatcatgcagtccattctacagatgggaaaactgtgaaacgcagttttagacttgaagctccaaactcctttctcgctcaccgaggctacctgagcaccctggttcactttattttttgagacagagtctcactctgtcacccaggctggagtgcagtggagcaatctcggctcacagcaacctctgcctctcgagttcaagtgattctcctgcctcagcatcccgagtagctgggattataggcgcctgccaccatgcccggctaatttttgtatttttagtagagacggggtttcaccatgttggccaggctggtctcgaactcctgacctcaggtaatcggcccacctcgggcttccaaagtgctgggattacaggcgtgagctaccgcgcccagccccctggttcacttttgaaacactgggctatgcctggcgagtagtgtccgagaggcgcgtgggacgtggctccgcatatttctcctagctctttcaaatgaatgaactggaaatatcatacaaccacttcaaaggtaagtgaaaataaggtggtaccaggaaaatattcaaagggccataaatctatgtagtatctaggaacttatttcaaatgtttactctttattttaaataatcagaatatgacttttaagccatggtgaacaaaaacaaatacaaaatcaaacaagtatcaaatgttcgacatttcagtatatggaagtacactgaaagatttcaatagcagtctgggtttttgtcaataattgctttaatggaaactaagtatatgtatatcatgaaagtaccaaaccaatgtactgcctttaaataactttctaggggtcttgagagttggcagattgattccattgtgttactttttgaaaaggcaaacagaaaagaactttgctttgggtacatatatatatatataatatatatataatatatattatatataaaatatataatatatattatatatatattatatatactatatatattatatatagtatatataatatattatatatactatatacatagtatatataatatattatactatatataatatattatatagtatatatattatatatatactatatattataatatatagtatatatataatatatattatatatatatatattagcttggctttcacctatgaatgtgaatccagaatatttggctattcatgacagcaaattttaccagtgacacggcataatttacacatagaagttgatgaaaatataccatgtgtcaatcatactataaaaaaggaatttcacatccaactaaatgtcactggcttgtgatatgtctgataatatagccataatgtacggtaatagattatacctaatttaccctttctgtattgccaacttttcataattaatactttgatagcaaaaaaaagcaaaccttctctaaaagttgcctttaaaggaaaagaatatgcgatgaacaggagaacacagaaattgcctatcagctcaaatgaatttaaatgcagatatggtgtaagggggtagcttttacttatttaagctaaactggaattattattattattattactattattattttggtggtagtagtggagttccatgagacccagtgtatcaaattcttactaatgcctttcctagttacatggcttacaggaaaaaacaacaacaacaaaaaaaactgaagcctttgagaaaactcaaggagaaatttttcaaaatgaaaaatggaaagtggctagggtatgagaaaaattctaaatctacctgaaagcacaggagttgatgtattttaatgtgctgggatgctgtgactgccaaccgcaatccatctgaaagctgtgggtccatccatccccatgggagacgtgcacccaatgacaaggcctgaccatctcagactggggctgccccatcagacccccaaaggacacaggcagcaggcggagctgccttgcacacatggaagggtctccagtgctggtcactgatttaggaaactcagtgggtggccggccatgtttatgtgcttgcaaagcttggctgcggggagagatcccaggcacgcttgggagacacactgcatttgcctagtacaagaattccgaccccaagacacctgctacattacacgtcacgtttctaggacagtgtggagacttctgcagctgtgtcatgcctctactgaacaggacccatgtgttagatcttaagcactgatgtttgatgtcacccacacgtgacttttctttctgactttttcacaaagtgcaacatttgggggcaaggccatttcacccgttagtgacttaggaacagtgcccagagtgtttccagggcccatgctatactagaaaagaaattttactgggtctcaacacaaaacgaaatccagaaaaataaatcaaaatttataaatgtttaattaaatgtaaaaaaaaaagtgtaccattatggcaacttcatgaatttttaaatttaggagccacagatcttttttggttaaagttttctcatttccagaaggatttcaagactaaatctgaattatacctgtcctcttttgagtatgtattgtgtgccaggcatggttctaagccacagaggctgctgcattcagccttccagtgatgtgacggtggtactaccaactgtccccgttttggagaggctcagtcagaccagctgctcccccaggaatcggctctcatagtgttagcaagtgccaaaatggagacctcaacccctagtcttgattacatgttggtggcagagaaggcagggcagccacttacagccagagaatttcagaacaaattagaaagccctttaaaaactttacagcaaaaaaacgacgtctatctcatgtaccacctgagtgcatgtggatttgcctgatgtgatttaggatggcactgcccagggaaggcctggaggcctcggcctctaaggggccagtttacgggaacgaacttacggctttattttgctgaccatattttgttaccctttttgcatgagaactaatttagagattatctcgtcccattgcctggttcaacaggagaggaaaatgaagacgaaagtatttaagataattgctcaagttcacacccactggcctggtggcaccagtgtgaaaacccaggtccctaaattcaggatccagaaaactttttacatgtttgaagcttaagaaacagaagcctaaatgcagacagggttttttttttcttatggcatgtcatacaatgaattctaacaaggactgcaatatattagtttagatcctgacctcactggtgtggcattcaaattagtgatatggttttgcgagggtccagacggaaagagaaattcaatgtaatggtgtaagtttcttccctcttctctgctcccacattggattgagaaggtgcctagatcatctctttgggttttcacattacctggaaggaactcttattttgttttctttctatagcaatacaaatgccatcttagaaaatctcagtggtggccaagcacagtggctcatgcctttaatcccagcactttgggaggccaaggcgggtggatcagctgaggtcaggagatggagaccatcctggctaacacagtgaaaccccatctctactaaaaatacaaaaaattagccgggcgtggtggcacacacctgtagtcccagctactcgggaggctgaggcaggaaaattgcttgaacccaggaggtggaggttgcagtgagctgagatggcgccactgcactccagcctgggcgaaagagcaagactctgtctcaaaaaacaaaacaaaacaaaacaaaacaaaacaacaaccacacacaaaaaacctcagtggtttctgtataagacaggaaaagttaccaagaatacacaggccacgccagctcactcagagctgcaccaggtgggttactgccgcttctgggacagaagcccattcccttcacggtcctcttaggttcccattcaccccaggggccctttcagaccttaacctccactctagggtcaaggaagtctgtatgcatgtaaaattcttcttcttggactggtttgatactactaaaaatattcaacagaaagacattctaaaattcgctggaaacatttaggcacgattattattaatgctttaaaaactgcctttgccaagtcatcaggtagttgaggagcttaacacagaaggaattaaaagtaccagggggaagttcccccagaactttcagcttggcctgaaatgcctttcaaagtggggaggaggggatgtgagtcacgacagcattttcctcctctttgagcctctgccttgctcctgctttaggtgggaggggaggaagaattactttctaattcctgtgtggatcaggattgcatctagaaagaactaaagtccaagtccaaatctgatgaattcaagggaagaggaattaagtagctcatcattcactacctggaaaatacgcttgaagcaattcccagtgagcaatgcgattgtggattggtaattacaatcctgagatcacagatccataaaaccatctgacattttcataatcattcaagagcaaagagtgacacatcttttcatccccccggcggctacgtgctgtgcacacgggccctccacgaaaccctttgttaaagggggacccagacttggaccactactctgcaggtcactccactttacccatctttcgtgaaggccaacaccggaagaagaggtctatgttgtacaacaccccggggtcaggtcccccttcatgccaggtccccaagtggaccctggtgacagaagcagaaccaactgctggcacctgtgaccagcatggccatggctgtgtattatgaactctggggaggtgtgggaggggagggtacttcctgcagccctgccggggaaaacactgattccctcctgtcagtacaaaaaaaatgatgaatgccaaagcaacagggctctgctttcttgaagaaaactgtatgtgacccagaactttactgataaactctcccaataaaaaatacaggaattacattaccatgaagctcaaaaagcggccagtgcagttcttaaaaacagaccctggcatcggtgcgtgccagcatctggacgccttagtttacatgctggcttactagttgcgtgactttgggcaaggtatacgatttattttttcttcaatttccctgcctgttcttttgaagattatataaattaatatgcgtgaagcactgtgaacagtgttgggcaaataacactatttaatgttagctattgctattatcgagtatttttatgattaagagaaaataacaatgtgaactaggtgttactcaatcctaagagcaattatttttaggtccattatcaccaccagtttacaggttggttccttcccttccttcccttccttccttcatttttttttttttttgagacaaggtctcactctgtcacccaggctggagtacagtggcaccatctcggctcactgcaacttccgcctcctgggttcaaccgattctcctgcctcagcctcctgaggagctgggactacaggcgtgtaccaccacaccaggccgatttttgtattttctggtagagatggggttttcctgtgttggccaggctggtctccaactcctgacctcaagtgagccgcccgcattggcctcccaaagtgctgggattacaggcgggagccactgcgcctggcccataggtacttttcatgcatttctcttcttcacttgaagcacattctccatatataaagatcctatttctcatgttcacatatataataggtttgctatacacactcaaagtcatagaagaattatactcatatgacatgatctcaaccaagtactttaaaaagtagctgagtgaagattaggccctttgatcaacctattttaactataactccctctaaaaacaaaaatcagacagaaagaaagctagtgcctcaggaagcactctacagtttgtaagtaatggctccaccttaccatctctatgaaaaaaattaaaaaattagccgggcatggtggtggatgcctataatcccaactactcaggaggctgaggcaggagactcgctagaacctggaaggcggaggttgcagtgagccaagatcgcaccactgcactccagcatgggcaacagagtgagatttcacctcaaaaaaaaaagaaaaaaaaaaagaaaaaagaaagctgcacattttaccttactccctagctgccctctaagccagtatcccagatgtcacctgatgtatggatgctagaagccccacccttaaacagaccacatcacaagactctacgttaacagcctggtcctcaaggacgggctgcccagagagcagaggcaacgctgcctccacccaaaaggaatcccgtgagctctagacatggtcatccttgcctgtgaggaggggggcagctgcagaggcctgtccttccctccaggtttgtacttcccggcatctgctgggttacacctttccaaaattacagccagctctttcacttttaaaatagaaataactatatttaattaaacaaacaaacaaaaaaatcaagagctcaagcagaacacagtcacgtgaaagactcctttaacctggggacagacagaagttatctcagaaatggccaatacgttaattaacctttttgatttttaatttagtttctcaatgttccagacgtaacaaacacctgaccagacaggtaaaggctgcccaatccataccaccaggaccagccccccaagacgggtcagttagggtccccactgctcactctcctcaacctctccttggcaaaatatcttcctccatggcattgaaccaattcctgcattgaaattatttaatgaaatctctgtagagaagatgctttgggatctcaatattagcatagagacacctaaattacagatttgtgagctgagagctggagtttttcattagatcctagaaatataaaacatacattaaaaaaacaactctcagccattcgtagtagctcatgcctgcaatcccagcactttgggaagccaaggtgggcagatcacttgaggtcaggagttcgagaccaggctggccaacatggtgaaaccccgtctctactaaaaatacaaaaattagctgggagtggttgtgggcatctgtagtcccagctcctccagaggctgaggcgggagaatcgcttgaacctgggagtggggcagaggttgcagtgagccgagattgtgccactgcaccccagcctgggcaacagagtgagactctgtctcaaaaacaaacaaacaaacaaacaaaaaactctcaaatatccttttcttgaaaaatcctttcgctctatcttttgtgcttaaggaggagacactctcagtatatcaacaagctactaagtgctctacgtgctaaccgaaaacagagcccaccttggtgctggtaagaacccattccaggcagaggataccttttgatggtgctcttgctccatgataaagttaatttttcaacaattaataatttctatattactctaagatatttcttaaaatcctatggaatatgagaaaaacaagttttgattttctaaggggcaggtccattactgtaaaagagcaagaaaccatctgaaacgaaaaacactttaaattccctttggcgtaaacttttggctacagcttcaccactgaaaaccctggaagaggggagggatgcatcaagtttacccgtcggcatgaaaaacagacgagctgtggcacagcttctcattctcagtccttaacttagtcagcggaatggcaggttgaatggcagtttgtccctccaaatgccagataactgctttatttagttaagcttgcacgcatacctcaagtcaaaggctccacacctgcaatgaggcactaccatttgcccttctataatagacagtcttcgagatgagccaaatatgccagccaatcatataagccaactcctcattttaaatgtgaggataccgaggccaggtcaaagagtctataagaaagaaatagatgatgtacagacagtatggtatggatagagagatgaacagatgaatggacaggtagataaatgaaggacagcacagaagtagacatcaggaactcctcattctgttaacgcttcatcatcaactatctcttttaaagctaggcaaaccgtttcatttttctggggctattttcccttacctatggggtgatgatcctaaaggctcttctcaggcccctcctagctctcattgtctttgattttatgaaactagagaattttccaaaatgattcaatttgaccttggcaatgccagggccattttgccaggatttcccagaattcattgcaccataatcatggaggggactcgggaggtcttattcatccagagatctggcaacatctgggcatcctgatttacatgcagtgtcctctctttatgttacactggaaagcaactgtgagcaaagcttactatagaaagttcccaccctgaatgaagacgttcaaaccataagaaaccagcatactaaaattagcagtgatggcccctcttgcttcacagggcaaatagaaaagtcagcattacccaagtcaacctgggagtctgcatgcacttggcttttttctagaagtcccttgtaaaatgtgagactttctacctggggctattgcacctctatatatcatacttatacttattccacgcatttagtttttccccaggccccaaattccatttggcagggaagactgtgtaaaaatggatgcttctttggcgcaaatcccttctgtctgctcagagggtgcttctccatataacaactgttttcttaagttgtaaaacagcaggggcagagtaaactgtatatacagccagaccgttacaatcgcatagacatcttttttcccctctgactgccaattcttaaaagtcagagtcgccaccatttgttttctgaagctcaataactttgttatttctttgaatgttacaggaaatgctggcagtgaggcaaaacccagccttctttatgcatgaggaaataagagaagtagagggtatacccagggtcacctggcttcggcttcttcaggctggtcggcatttcaactgtcccagagacggctgttgcttctagttctaaatacagtggttctacagcctcctgaaggagcatttctctaagtttagtcaccctcaaagtcgattttcttatacctaacaactgcctccctcccagccaggccccttgccataattcaagcctgcttcctctttggtcctctgtggagaacaaacttgctttggtgtttatgttctgtttaatgcagggttacattaacgtaggaatgtccaggttgacattcctactctggaaacctaagaagagctcacagtcattccttagacctgtgtggtcctgtctgtgtctatggcctgcttttcactcataaagaagaatcagggtctgttatcaagtcccacagtctcccaagtctaggcatggccagaaagtctcgatcagaaaaagctgagagggccctctggggaaaaatgcagtcagatctggagggagtcaccgagcacagcaaatggaaggaagggaaaaagcagacgaggaacaccatatcctggtggcctgcccctggtgggcatggtgattatttgcagagctccatccactcaaggactttgggaaagttgatgcagcttggggaatggttccagaaggtgacccagatgccatgaggttgtggccaggaccacagggaaggctgccataaaagctgccgtgatcacaggatagcctgcagagaactaccttaaaaccccacctagaaaccaccatgcagggaaggtcatctagaggggactggagcagtagccagggatgaaagcagggatgccctactggggatcactaacatttcctgccttcattctctgcatcaggcacacagcatcatttggcttgatcttataaagaagctctcattattatccccattttacagaagaggaaagtgaggttcagcaaggctctgtagctcactgaaggcttaagaattccactggcttgcccataaagcccaaattcttaaccacttcattttacaacctgacctccctgcatcttggcttttggggacagtaggaagccctgtttttcaatatccctcactccaagaagagagtatattaattttccaccagggacctgatacggtttggagacatctggatgctgggcgggggtgctgggcagttccacagacctggaactgtaacccagcctcagatcctggggaagggtgtggttctggaaaagagcgttactctggtgtttactcaaagatagtcattaagtcactgtgaagacatcttttctgcagactaaacaacctcactcatttttttaaaagcttccctcacaggagttattttttggtactatctttctatatttactggttttccccagacattcttctaccctcccactctctatcttaaaaatgcctgtaataagattttgatctgtgccatagaaagaaaagggtcattttcatagttttcatctctggccctcatgaattaataaaaggccagcatagacggtaattactcccttgtggtccactctgaccctcagacctctttgggctgcctctgtgcctggccaatcttccatttactatttgtttctgatcctgttgaactttactgtatattgaggaagcagtccttagtttcatgctgccctgaatggttctaacatatgattcagtcagcctaatttccttttgccctctaaaaggatgcttcaaaaagagctcagtgcacagaaacaagctttgagtagcgagagtattgacaatgcaactttttggctttacgggggcctgacatccccctgggggaaaggttgaacccaaggaatctgagacatggtccctgagtataccagcctggagggtgtaccagcctggagggtgtaccagccccaagtggatgcacttacttcgaggttctcggggcccatccactgtgattttgatggctctgtggtaggtggcgacttgcggtgggtttgtgaagacagtgatggtcagagtgaagcttttccctgtggggacacgatagagaacaaaacagaatgaggttggtggcctgaacatatctgttgaataaccaatcattaatttatgctgtccagcccttcagcacaagttaccagttttgacaacactcccggaattttggctttgcttcaattctggaatacacacctatgatagttgcctaagtgtaacacttcacatagttatatggctttaatgtaatcatcaataaacaatacaagatcaagaaagattagaatttattttctgttaagtcaggatttccggaaaccatagagtcagattggcagctctccacttctggttcccaacttccctgctcccatctttcccaattatttataattcagggcaaataagagtagaagaaaccatatccatctttctcttcttactttgtacctttgaagatcaggaaagatagaatttctaagtttgaaaacaggctaaattagaatcattctgtctatatttttaaaagacgaagtctggctgattttaaatattatttgaaaatgccagatgttattagaggtactcatgggatcagtcagaataaaattgatgactcataaatggacttaagtatatgtaactgacagactgagattcaataagtactagtaataaaaaatgcacaaaatttccattacacattttacatatatttataaaaggtgagaaaatcttcattgcatagatttactaatctaaaaacatttcttgttggtaaagtgattcagaagataaatctggctagctgacctttggcaagtcactagacacctctatgttcctcagtatccttaccaggaagatggttacatgcaaattttcctaccttagagagttttaggggagattaaatgatttaccgtgagtaaccctgttaaaacagttatctggcacacggtattcaacagggtgtgtctgtgcgtgtgtgtgtgtgtgtgtgtgtatgttgtctgctttatttctcttctctgtttctcacgggtctataataggaccctaacatttgattaagtctgatgttcaatcttcctacatcaatacagtagttctttaatcaacatagtttctcctcttaatcatgtagcataaagtaaatcaaagacagatgaaaggaaaatattttcaattgtcacacatgtcttaatacaaaggaaggccacagaaaaacaaatgtcatgcgtgtcttaatacaaaggaaggccacagaaaaatgctcaatgaaaatataatctttggccacagcaagccacgattcctaatcgtgagaaatctccaccgaacactccccaaagatgtggattctatctgtattaaagtctataataaaaagagcaatagcaagtaacaattagatgatgaaggctgctctgcccattgtgcctttataactaaagtctcagctgacctgtccaataaacgaggtgaggatgcttctggggagtgacttccatggagcagagcatcagggatgccaggagactctgcctccaaatccatctttcccatcaactggcctgtccccagaacctagagacgagtcttgttggcctttggggatttgccagttttaggacatcgttcagatgttatcaggcgacactctggatgctttcctaccgtggcatctagctgaaggagaggactgggtagaagaggccttggccaggcccagcaagcagggtatgtgatgtgatgtggaggaagatgctgccgcagagggaggcaggtcctgggggcaactgcccatctcactgggcagtctctggctttccaagaacagatccaggagcaatgacagccacagacggggagcagccacatccacatgttccagagctgactaacagattgtcctacaagcctcatggtcagcctgttccctctctgtcaagaacccatgaaggttatcacctgtatcatcaagactgaactccagaacctgcttttaggatcttctcactaataagaccctgccccaagtaatttctcactcaccccctctcctccgcatacctgactcccagtgtgcaccctccgagttctacccatgagccatggcattgagatgctgaggtcttccttcctccagccacttcgccaatccaaggctccttgctgcacccttcacccgagtcttcctgcccttcagcatctggcaacgggcagtcactcagtcacttgttttccaggcagccttccttgatgactacattttgctttatggctgtttgggctgcctcataaatcatccttcacctttgattatttagggtgtcatactgaatgcagtttgcggctgtgtagacctagtctcccagaaggtggggacccttttctatatacccatgtagccctcacagaaaggtgggaaagggtgcaagtgggaaggggctttaggagagagggggtatttaaaattaaaaaaaaaaaagtcccttgaggacacaacaatagataatgccattgtcccagtcctgagtaggtctaggggtgcatgtgggtgtatgagagagagagagagagagactgaggtggttctttcagcaagagagttacaagtttggggatgcaatacaaacgattttacctctccagatctcagtttcctcatcagcaaaatgaggggggttcatgggatgcatgcaatgtccctttcaactctctgatttcatcttccaagaatgcagctggcctgagatgcccatagccatgtgcaggcgggcaggtccacgtgtgattcttctgttgcctacaactctagcacctcagtgacttcataaaaatactgtatttgtttcctggggctgctgtaataaattatcacaaactgggtggcttacaacaatagaaattaagactttcacaattctggaagtcagaagtcccaaatcaaggtggcagcagggccacactccccctgagggctctagggaggatccttgcctctttctcgcttcggatggtggccagcatttcttggcgtttcctgacttgcagctgcagcactctagcctctgcctccatcttcacatgactgtcttcctactgggtgtcccctccctcttcttagaaggacatcagtcattggacttatggcccacccaagtccagtatgactttatctcgattacacctgtaaagaccttaagccatattttaaggttctaggtggacatacactttttggagaacactatttaactcagtacaaatagcaatgtagtaagagctcccatcatggctctaccagtgacaactgctctacaggcacgcgtgtgttttaccctctggaacagtcttgctccgatagtggctctcctaccaccacgctatccacgactacccaaatgacaacaaagaatggttgcattcataatactggcatttttaagtcgtgtagaacttacaactttttaaacaccttcccatatactatttcatttggtcctcacaccaatctcatgaaataaacaagatggattttattgttcttgatgaataggtagcaaagctaaggcccagaaaggttaagtaattttcccaaagtcacacagctttgatatacagcaaaactcatatccctgagctttctactcactgttcttccggttattatccctgaggtcataaatctccacccgcaaacccaatagcaccagtacaagaaatctggactggagatactttatccacacctaccactgccccaaaaagtaaaatctgactctgtgattctaatgtaccaatggtactcaacctgggttatagctcaaaagcattttcttactgagctgcgtttgggcctctggcagttgagcactcatgacaccccatctggtaaaccacagactaacctatataatcaggagtaaaacttaatcaaagtgataatttgtgaaatgaatggtcattatctgaattctcattatttcatgcccatcttttttttttttttttttttttgagatggagtcttgcactgtctcctgggctggagtgcaatggcgtgatctcggctcactgcaacctctgcctcccgggttcaagcgattctcctgcctcagcctcccgagtagctgggattacatgtgcataccaccacacccagctaattttttgtatttttagtagagatggggtttcactatgtcagccatgctggtctcgaactcctgacattgtgatccgcccaccttggcctcccaatcatgcccttcattttaagcacagtcacaagacatttccaccgagcacacactagtaggtggggcgttttggccagtcatgtggttctccctcacaaagggctcttgtttacagctttgggtacaaggacatttgcttattatcttacagacacagtgatgacttcttcacaggtgtaggtgacatttttccacagcacgaaaactgccttacacgtcctttgtattcttccaatgagacccagcagagccttgatactgggctgcagtcagcaacgggcgcacctgacaggagccacatgctctgccctccacgtggccctgccctctctgtggccccaccccatggcggctgggacacagcccttcttggccagcatctgcagaagtaggatctgtgcctcggggcacacgtgttatgagccaaattccctcattgaaatgacctataggcctggtattttaagtacatgggtgtggagcacaaaagactctcaagtgtttctcccagcgagctgcagccggaatagtgagaaatcacaggagagcaagggagggcaggttggctaaatagcaacggccccaaaatgggcttttcaggacccagtgcaggggtggaaggatggggctgctgccgagagggccggtgtttctgttggcagcctggaggatccaaggctccctgaagcactcactggccttggtctggtgaggccagcagaggctttggtcagtgcacagatggccccagcactgatcctgtgtgtgctgctggaagtcggcagctcttggttccagagggggccaccacggggtcacagggtggcctgcatggaaggaagccaaggaaaggggtaaacaaggggtaaacaccaagtccttcctcctgctcactgaaccctgaccaccacagcagcatcagttccagccagggcttgggttccaggaggaccattagaagaccattagaagcaccaaacgacactcatactgaataagaaggtgagaacaaaaaacaacagggcagatgaggtttgtcttgatgtaggcttggaagcagtgagagagaagaattccatataaaatcccatgaaggtggaaacacagtggtgattcattcagtgtggactctcaaggcaacctacttaggttcaaaacctcgctctgccacttgctagctgtgtgacctcaggcaagttacttgacctctctggggcctcagctttgtcatctgtaaaagggggttaataacagtcattccatctcgtagcattgttctgcaggttaaatggaatgctgaatatacaagcagagcacagggaaaggtctcagtaaatgtcagtggaatgatcattaaagacatgataaaggtgattccacaaagaccagagctgtgacagatcccgtaagaaggagctggggatgaagtaggcactgacgtctgacatgaggaggggttttgtgcgtgtgtgtgtgtgtgtgtgtgtgtgtgtgtgtgtgtgtgtgtgtgttcagcaggtgatggggctgctaccaggcctaaacgcaacttgaacttcaagttcaagttcactcctgccccgccagctggcgacctttgtaaggcacaactgtgagtggctgatatgctatgtaaacaagccaggccagtgctcctcactgcaacatgtgttgtctccctcgacgccagtgtgtccatccaaatgccagggcaaaatactaactgctttatttagttgggaagaaggtcaaggggtgagtcttcctggacactcgctgccatgacacactccccagggccagtcagcggggaggccccaggtctaggcttgattagtcttgacgttggcggccctggggctggtgaactctgacagccaattgtggtcaaataaagccacggctggaacctgcagttccgcatggcccagcgcactctccacttcctcaccacatctgggaagtggctaaacctcaggattgcttcaaatgtgcacactgctccccaaagagctgagggtggcaaggagattacaaagcaaaaagacatgcagctcggggtcatttcttgcctaggtgtgaagaacatatttaaaagtgcatccaggccacatcagagcagaatcctcctataacaccccgtgtctgacgggcgagccccgactcctgttgtgactcggcctcctcaggtctagtttgcaggtatccccggtctacctgagttggctctgcagcagactctgttcctgtcactctccttagtgtaggtctgtaagcatgagtcatcttcttcttttggggacagtttcaggggatgtgaaacttgccctttgtcacgcaaaggaaggctgcagacacaaaggagccgtctgccctgggggctcagagtccttaggaaacacaatcgcaacatttttcactcttgtgtttgtctgcaggaaagccagttgtgcccagagtcttgaaacgcccaaagagtgagaaaggaaaaataaaagaaaaacatcgcagcttttaaaaaccaagagagtcagtgaaggctcaggttctgctctttgcaaattcaggaaatcccacaagatcctgaaaggttgcagggagatttctccttttacaatagatggctttgggtctaattttaattgcggataactaagtataaaaattaacgtaccctcggattccaggagtagtctgcatttggagtattttttatgaagtatttttaattttgatttctcacttttccactggaacaacctaacagccaaaattcatgcttatgctcctcttccatttccttacccaaacatttgccactatttttgacagtggagttgtataattaatttatttggggatttctggacgggatacaaatccttcaacttgcacataatttcctgattctccatgctgaattgaattaagatgtcggcgtactgtatatacttgtgtgcaaagtgcctgtatttgcagattgcttgatccaatcgcactcacatcacacatgcaaaatgcagacttgaggcctaagctactggcaccaggactaccctcaaaagtcagactgaaaatcaggtccttagaatatagaactcagttttccatggaaatggcatttgtttggaattatggattgtttgaaaaatagctgttttacttggagaaaaccgaagacatgcaaagcattttctctggagatgttctatgaaaatgagttgtttgaggacagggacagaattttattcatctttgtatcttctattctgaggcaataaagaaaagtttgataaatgaggccaggcatggtggcacatgcctgtaatcccagcactttgggaggccaagacgggaggatcactagagctcaggagttcaagaccagtctgggcagcttggtgaaaccccattgctaccaaaaatataaaaaataaaataaaataaaataaaaataaaaaataaaataaaataaattagctgggcatggtggcacacatttgcagtcccagctacttgggaggctgaggcacaagaatcacttgaacccaggaggcggaggttgcagtgagccgagatcacgccactgcactccagcctgggtgacagagtaagaccctgtctctaaaaatcaatgaatcactctgcaaactttcagtttgacagccagtcctttacaacgtcgaatttcacttggaaggcatagcttgctttttccaaggcacaggtatgctgggctcaactgcaggcaggggaaaagctcaggtttgcaaaaggagtggaggggcgggcctctttatttggcagaatatcacctatcccacaaaacaccatgatgttctcatgcaatcttgcatttcctttcctgagatttcattttccctttctaatcttccttttccttttgataccacagttccctaggatctcagctggggaaccaagttttaaccaaaacaccccaaaaccctgaattcgcagccccctggagaccaaggccacacctgctgccctgtgcttcccccaaggacagccaccagatttaccagtcttcactcatccatcaggctgtgtgtttgggctggggtcacacagggcaagtgaccaaagtgacctcctgggcctggcctcctcctgattccgatagtgcccctagccgggtgcctcaaacacacagcccaaggccacacagagctgcagctgggaggcctgaggcatggacattcttcagggaaggaaggcttggggggcgtcagctcctgctcaccagccttgcagcacttgccactgcaggtaggaagaaaggcaggtgagtgtggaggtagagagggaagagagggaagcttgaggcaagcttgaggagggagctgacttctaggtacagtgccatctaccaaatggggtccttgcaagctggatatacacatgcctggcgctgcttgaaaggagaaaggagagctttcagtctctggatgggtctctaagctccccacgcaccctccaaatgtcctttccattctttaaactgtaagccaagtatctttccacaatttgtatctggagttagttataagtggttctccatttcattaggatcagaccaaattcccaacgtggatgttaaggcaatccccgccctatctctctgtaaggctccccgccatcactccccaaccaccgccactggagcatctctcagctcccaacaggccaggtgctccttcctcactctgctttctctgctgggacatgattcttcatgcctccaccgggttagtctccttgtcacctgcaggtctcaagtgaatgacaagtggtccagggagaccctctgaaccttcaccaggttctgtacctctgagccttggctcccgccacacccatctatcatgtgttatctactcacaacagggatggcctacttaattgccatgttccttactagcccccaaggctgtgggttctctttggctgaccgtcgtatttctcatgctagcccagttcctggcacacagtaggtgcacaatgtatatctgataaatgaatgaatgaaagaaatgcccttagtaaatgaccttggggggtggggcagagggagagttctaataaaacaggaataggtactatatttccatcacagggtcaatgcccaataaaagtttgtaattatattattattacataggcttttacttgtgaatacttatggaatgcctgctgttatctcatgcactctcattttagtaggcccttagcaggaccaaggaatataaattccttgccatcgaggagtgggccctgaaaaacagcatcattcccaacttttcaaattcagcaagacccatgctgcctctggcttgctctctcccctcctccctcagggattctcgctgtagaaggaagaacatcatcaagaggggccctagctcttcttcctaagtatagttacatacacaccatctcgcttttatcatcctaacatagatgatataagtcatagatgaaaggcactcttaaacctattgaacacagatggggagactgaggctggcacatctgagtcctacaggtgtgccctcttctcatattacattatgctacttttctaggactcacagaatcatcgctaatagatgtgtgtgttttctatgtcatcattacgaatcaaaggaatattaaataggacacaatgggttcggtgtaatctagagttcagggatttggccagaatgcaagataatagtgtagtaagaacccttccaagtgacagccagatgaaccagtgctgagtttatacgtggccaaaagagaaaaatatgcatggatgttcacttgcagtttatgaaaatgctgagacacaaccttaagaatggcttccagcggaacatccggaagtcctcaagtagtccaaggcgagctgccgtggcactgctacaaaaccccttcaacttgggtggaggcagcaatgatcactcaggaagaatgtgatgctgccaggtgccagcctgtgtaacccagcgacaggacaaagggattattctgcttcattattaaaatgaagtgtttactgttaaaatacgattgggaattaaaaggggcacatatgaatcataaatatttgcatgccattaatgtttggacaaaagagttggaaaggctgagttgggagaacttcttttcccatgaaaagcagtgcttcaaattacagtacatatttaatttcgtttctcctattgctaacaggaatctcagggcctgccgcatataaccctttcacgaccacagaaccgtatggggccctgaaataaggataaggattgtgtttcctccttggaagctcacccatttagacaaacaaaaaaagcagacctctggttgttgttgctgtttgctgttgtttgctatgcactcacagagtccccattgtctgccccatggtgttggtgtcactgcaaaaagtaacaactcctaacctatgtcttgtctcaggtaatcaatcctcattgtccctctgtcttcccacagacaagggcaaaatcaggcttagacaggtcaagtagcttgttcaaggacagatagctccaagccagtggttctcaaccaggggcgatttgcccccaggggacatgacgcaatggcttcagagatttctggttgtcacaaccaggagggtgggtgctagtagcccctgagtagaggccaggggtgctgttaaatgttcaaccatgcacaggaaagccactcacagcaaagaataactggccctaaatgtcagcaacacccaagttgaaacacagtggggaagccagtaaagtccacgtgctgaccactaggctgtactgcctaacatcaaaacagtcctgggcccagcacagtggctcatgcctgtaatcccagcactttgggaggccgaggcaggcagatcacgaggtcaagagatcgagaccatcctggccagcgtgatgaaaccccgtctctatgaaaaatacaaaaattatccaggcgtggtggtgcaagcctgtaatcccagctacttgggaggctgaggcaggaggattgcttgaacacaggaggcggaggctgcagtgagctgagatcacgacactgcattccagcctggtgacagggcgagactccatctcaaaaaaaaacaaaaacaaaaaaacaaacagtcctgaacagtcattcattcacagaccatgtatcaggcatcatctaatgtcactcatgataccacctggagctttctagttaaaggctggatctcttgattttggaaaattcctgtgagcccacttcctcggggctcctgagcacatcttcctttccacagtgcttgggtctccgttcctacacacacccttgcatgccacagctgttttcaagctttttccccagtgaccttctctctagagcacacctacagcaactcgtgagctctgtgcagtccctggctcagacaccgtccacgaactcccatttggatagttaatgcttactagtcacagattacatgacacacaagtgatctctgtcgaatctaggagcgttgctctactgtagggagcttaaaggaagcagatgtatacacggagaaggaaaattaggcgtgagggtccccatgcagcacaaaagcaaggaaacggacaaacaaacaaagcagacacagcctgacctattccagaaactcaacctgcagcaggctctaccttgatgcactgggaacacctaggggagtctccctacggatttttgttttcaaatcatcgtgccctgaatctcagtgtaaaaaccggtgatggcaaaactgacatgctggggcaggtgggataaagctccagaggaacccagccatctgtctgcgggtggcatctgcaagcccatcctgtgggcggcaaacccacaaaccttggtcctgtctcccctcctgccacgtagtgccttcatttttatttagggtatgcagactgagccattttggtgtctgggagttgtctgtcagtgacacacaccaagaccttgcttttatcacttttttttttttttttagacggagtcttgctctgtcacccaggctggagcgcagtggcataatctcggctcactgcaacctccgcctccctggttcaagcaattttcctgcctcagccttcagagcagctgggattacaggtatgtgccaccactcctggctaatttttgtatttttagtagagatggggtttcaccacgttggccaagctggtctcaaactcctgacctcagatgatcctcctgccttggcctcctaaagtgctgggattacaggtgtgagccagcatgcccggctctttatcacttttttaatatgagtggacactgtccactgacatcaattcccattcctagatcagtggctccatggactctctgctgaagtattcagggaaaagcagtgagcctctggcagagggcttcctagtttctgcagtcctcgtggacctcacctgtgtgacattcatgagggggtggctacagtggggagccttctcggagaagctgccctgctgtgtgtaccacccccacctgcagccactcctccagccactgcacatccctgacccaggatagcaggcagggtcagtggcgccagggggatggtgcaattctatgcatacagaacactgctgttttccctttaaaaaaaacttttaatattcagtgatgttctctattttttattctgtgcaatgttttaaaaataagtttttcataaaatttaaaataagtttttcatacattttgataagtttgtagggaggcagaatgtcagaataaaaggggcaagggaaacattttacaacctatgcatgatcagggcgagatcacgcatgactggagctagatgagtttctcaatctcagcacaactgacatttgggtctttgttggggaggctgtcaggttcatggtaggacgtttagtagatccctggcctctacttactagatgccaccggcactccccaacccaatacacgaccaccaaaaatgtctgcagatattgccaaatgtcttctgggagtcaaatcaccccagctgggaaacactgagcaagattatgatcaaaattgataagcagggagacaagatactgataataaactgcccagtggtttcagatagaataatgaaggcaggacatttgtcctaggtactagagacacaccatttaaagaggcagacaaagccttattatgatgtgagttagactagctccttactaattatagatagatagaaagatagatgattaatactgactatcctctatacaatagtttcaaatagaatgaaggaaaaaaatctgtaaagaccccaacccaatgccttgagcaaactggagtgtttccacctccagagatctgatgagcacacagatgaccaattatgctcaatctgcccatattcctgtgatttaccttggtttgcatacggtgactcaattagggccatacaccaccccagagtgctggccagccctcctattaactggacaggcacgtccttgggataggtgatgggggaggtggggtagttctgcagatggccctgcccatacattcttaatgatggtcttaaatctcaaggtaaaagcccaaattaatctaagttgagaaataaacaggaaatgtacttacatcttctttgagaaaaacacagtttaaatggctcctaaatgaatgcttcctcactaaggaaatcagaggaaacgcattttcagtctagcagcagaatggccgtgagcctctcaaaggaagttgctgggattcctctatggacctcaactgcctgacaccttcattggagaacgttcggtgatgtcaaatggagctcctgaatgggacatgctgcccaatatagactaacagggactgggcaatgtactggaatcccaaatcagtgcagtgcaaactgaatgccgtcgattgctctgtcttcaacagagatcaaaatacatctccgttgaatgtaggactcacagcagaaccaatgatggagtatgcgcgctgcctgaagtccaggaatgcatgtttataaatacagacgttgaagtgctgcgatctgtccccatgccccgccagggagccgacaaaacgagcgcatgtcatagtattcataggcagctcattaaatccacactgctcacttattaatttccattaattgctttatttgggctttagatgagaagatgttattagcatgaatttagtcctcaaagataatttggcccaagaagtctctcaatggaagtatggatattctcattctctctctctctctctctctcccccttgcacacacgcacacacacacgcacacacactccactggctaagaatcaatgaagccttcaaaagcatacactctccccatattgacagtatatgattattcataaacatctctttactgatctgaacttgtgtcataatcatctacagaaagaaaacagccttaagacagtacaccggccaggtacggtggctcacgactgtaatcccagcactttgggaggccaaggcaggtggaccacccgagatcaggagttcaagaccagcccagtcaacatggtgaaacctcgtctctactaaaaatacaaaattagccaggcgtggtggtggatgcctgtaatccccagctacttgggaggccgaggtaggagaatcgcttgaacctgggaggtggaggttgcagtgagctgagatcacaccactgcactccagcctaggcaacaagagggaaactctgtctcaaaaaaaaaaaaaaaaaaaaaaaaagacagtacaccatctctccttgtcaacaagtaatttttccttaaaaaaaaaacaacaaaaaaaccagaaacacagaatatgttcttctttagccaaccttctccaccctctcttgccccttgccaaccagcacaaaaaagaaaatacaaaactgatttattagaaccagagcagggttgcagccgttggctggatcactgtttatgtctataatgcttgttgctgaaacaggaagctctaaaaatcactcaaccattatttctcttgcaggcactttctgattgatagtcttctgtcccgaccaaaaagaaatgcctccaccaaacacaagccggctggcaaggaaggggttgagggtgggtggagagaagtacagcttctgcccatcaaactataaaatattgttcatacaaataacctcaatttaaaaaagctgtgtgacgccatcagcaatgcctgacacttcacaaaatcagcaagaaaactatgaagggatcaactgcgaaactgcctgttgcaagcacaagcagttttcaagaaagcttttcctgctggtccttgccatgactgggccaccccaggctttaagcagggcagggagcaacttgctttaggaaagtgttgctatccttttattggcaaatgtgaaaccgaaatgagaaacttggtctctagagatgaattctacatcagatcatggaggcaagcttttgacctgcccgtcgaaaagcagcatttgttagggctggttgaggcttggtatatcagagactgggtctttattcatctatatttgcttgcaatgagatctgaatacagatttcagtatatatattattttaaagtgtagatcagtatgtaacagaagaaagtgggaaaatgggagagttgattttaatataactcatgtcttttccttatattctctccaggagatctgactgccagtttataccatgaacattacccgtgaaacaactctggggtggtcagatgaatttttccttcttctattatatgaatctgttaatagaatagagaaggactgggatcctacgataatactgcgagtcattcagatcatctcttggtaacaaccgctacataaagccaagccatgtctctttgtttagaatatcagtaccgtttatccttccctaaatgtaccttcccttcctcttgaccacagtcttccactcacctgaagggcaacctcccacactttagcccaaataatgtagaataatttaagaatgaaaatgccttaagcaactaacattacacaaatatgcaataacccagattgtgacaggataaatattatgtctgggaagatattcacagcaagaacataccgaaggaatttcattgtataaatgtgttgggaaaggatactattttgaaagtgggcaagattaaagctgccagggaggtcaatgtaaacacaaattccgccaagaaactcaacgccatcctgacaggccacagaacacttggccttacagggctgggtgtggacacagtacgagggaagcgactgtcctttcaatgacagaataggccccctcccctttacccgtgatgatatgtgggcatacctgatggccatccaaaggcctggccagtggtttcaaggagatctactttcttaattagacaaaccagaccccggcgataacaaaaacacaggtgttaccaaaacagcacaggttcaagaaaatgtctagctcatttgtacatgtatttattcattttcaggtgtctactatatgcggcatagggctaagctggccctccatgatcaatgcaaagttccaaattcacaaatttttggcctagggtctgtggatccccagaaggtccataaatgagttctggtagcctagaaactgaaatgatatacgtaattctgtgtgtaagtgaacacgtgcattttttttttgtccttggaaaaagccttccaaaggattttcaaaagtatctatgatgttccccaaagattaaaaatcatattctaagaaaaaactagaaagaaatgtgcagtagaccatctttcctcctgcagcaacaatgcagctgataaagcagctggagagatttcttctttggttctgaaatgaaattactaaagctgtatttcctgattgatcagttattctctgactgattaaatactccaactgggatgaagcagtcacagatttcattgctaaaatttctttttcttttttctttttttagatggagttttgctcttgttgcccagactggagtgcagtggcgcaacctcggctcactgcaacctctacctcctgggttcaagcgattctcctgcctcatcctcctgagtagctgggattacaggcgcccgccaccacacctggctaattttttgtatttttagtagagatggcggtgtcaccatgttggccaggctggtcttgaactcctgacctcaggtgatccacccacctcggcctcccaaagtgctgggattacaggtgtgagccactgtgcccggataccaattgctaaaatttcttaaatttctctcagctgaagccatgatacactttcttgtcattctaaaggtggcaggtgatgtagcacttgcctcaactgcagatgtaaactgatataagctgctcagtgaattcgtttcacataagagaattccttttgaccctgaacttcaattttttgggggtgtcatggagtcccagtccatttggctaaaatgtgaattattctgaacaataacctctgtgctcacatgacctctggagttcagcccggtccccagagctccctaaccctcatctcctgggagctgctatctcttcctcctttgtaaaggagcggtcgatttacatggagatactgaatcaaagagagaaacattccaagggtgagatacactctgaaccaagatttaaactgccaaggagaaaaaggagggaatggaagaaaagagagaaggttcaggcttctacagggccagtgtagccagcgaggccatcaaagccggacaggcaggttttcccagttacggaatgaacccgaggttaggagctgtgatcctggatggcagccagcgcccagatagattcgttttgtagaacagagaaaaacccttccatgttcaacctctggcagtttctatgaggtttacaatccccatggactggcagctggtcacagaaagagaacttctttctctacctttcattttgcaccacttactaggccccttggagaatccatcagactggtggcttttgacagaattcaaaattggcactgaaagtttggatgagccaagagccagggccttctgagccatggcgtggtgtgttcatgccaagggtatattttcaagcacattttcaaaaacagaaaatgagacagttgtcttaagatcacttaataaaacgtaatgaaactgttaaaggtaagattcagtgaggaagattaagactaattgttaaaattagtcagaatgatctgctctcttcctaatgggaagcaaattgcaaaaaaaaaaaaaaagaagaagaaggaaaaagaaagaaaaaaatctggcaggctttggtgttgacacttacacttgaaagagaaaaatcaagttatattttatgactatggaaagaaattatgacagagtcaaatcgggccttcagacagctcatttacttttgtagcgctgactaaaaaaaaaaaaaaaaatatatatatatatatacacacacacatatatatatacatctcaagaccaacaatattcatatccacagtaattacaattgggtcaaatgttccattagggtttccgtattttttattgcttattatcactggtgggaaggagagtctgttcaaaatattgtctgtttatggcatttcaattaattttctcattccagagtatgggaagacagcccagccttggttgcagctattttactttttggggtttatgcaaactcaagggcatactggcacgaatcctgcagccaaatgcaaacactccacaccttggggaaacagttcactgttacccaagtaaacacaagcacctattagtcacccactcaaaacagaaatggtcaatgagggatgcaagatcagccatcaatgccagaaaagaaagcacactgctttcaaaatctcatttttttattatcactggtttactgtgcattgccggaaagccactactgaacttcttgtgggaaaatgtcactggcacggatcactaaatagtttttaaaacttttatgaccaaaacctaacttgaagacccacacagatgcatagtatgatgataacactttctctagaaaagcaattcaatgatacttagctattgattcctaacagcagaaatccacaagaactgaattaagagagttagctaggccgatgggcatggaccaggctgtggggcctttgttttttattggcttctcacccactctgccagctactcatccgaagcctttaagatgttttctagacacacatctctgaatcataatgcaaattccatttactgaaaggtggggacttttaatacaacaagtgaacccatttaatgacttatgcttttatatcttatagcatcactcatgctttcaaaaagtggatataattttctttgcattaccctattattaatatagtactatgaatatatattttcaatcacattatataaattttttattttctccagctatgattctattatgaaaatgctccagatagctaggatagcaaaaataatcaccaaaataatcaactcacatttacccctttctcctttctgactaatcaaattctctgagaactgagattttcttgtttttaaatgcctttttaaagagtaataatttctcttattttaaatgttgtttgattggtgcttccatttttttcaatacgagaactattactgttatttaggtatttaccataagtctttttattatacttgaaataacttatttgtaagcttaatcggtactatattacaaaaaatgagtttaaaaaactatcttacctccctcaactaaacttttactacttgttgctatttataaaatatgatttggttcttacaatgtaaagaaaacataatacttgaaaataattggaaaccagaaaaaattacaataagccaagattcctatttctgctctaatgctttgataatgagttaaaggcaaggaaaaataaaatcacacatggagctgaagtaatgcaacaatttcttggataatccaatctctaatattattagtatctaaaatgctaaccaggcccaacccctcctcctaaataaggcattgaaaagaaatacaacaggaagatcatactgccatcaatggtactaacattatttcttcatgtctttttctaaaaaggtaagcttgcttgaaaccatgtttcaacatcatacactagaaatccctaaaattattagaagtggtcattcgaaactctgtcacttttcacagatagcccacagatcatacgtcaacagtttccattaaatagcttttgtattgttatccaagagagaatcctcattgtaattgtataatcctagtttcattaaagtcagttttatattttttgcattttagtaaaaatctcaggcgtttctttgaaattcacaattcctacgttgcatgttccaaatcagtcttaaatccactcagtaacataaagcaataatatagagattctgctaaaaatattaaacttcaaataaatatttttaagagcttgacatagcaataagaatgttaagacagaccgagtttctagggattccatcacagaaatcactagaattttgaaatgtgggtttgttgccatgaaacgtgtttcaagcatagttttgacagataacgtacctcttccacttcgaccgacaaacctgaggtcattaaatcttgcaacctggttcttcatggctgcggtagcatttctcagctcagccgagtagttttcatcattgccagccatcacagtgaccagagtgccatctggaacatcccctagggccaccacctaaacaccagtcaaaggacaaatgcagacatcagggatgttatacatacacttttagggcatttgtgtagtgattattctaaaattaaatgtatattcaatgatttctttttaggttgcagaggaatagcaatgataacttaagcaaaacaacagaaaagttataaagagaagacacttttttattatattttaggttggtgcaaaagtaattgcagtgtttgcaatttttaactccaaaaactgcagttacatttgcaccaacctaatacattatgtataactatatgtaaattttcaaatagtgacacatatactaaatttacctcataaagccatagtaggtcacatagcacagttggaacaagactaaccatagcaagatatcaaggattttgagtagctatgccgtctcctgaatacaagcatctcttcttaatttctcccgtttgagaaacagaacatcctgtgtttgtaagtttataatccaacccatcttttacttgctcagacctccactaacaggctgaacaaggtgcagactttacttttagaaaataaaacaaaacaaaaaaacacaaaaaaacccaatttctgctaaaagtagatttcatcttgctgacgattcttaagtaacttaaactgtccctctacagttcatctttgatacctcctactcatcgctattatcttgagttttactagcaatgaattctagcacacaagaaaaaaaaatcagaaatgcacccttcgtttactaattacaaaatcaacagacctcagaaagacgggacattcacttctatgcactcccctcaattcaggggtggaattgggttgcatttttgtatctgtgagtctcagcgtgtgtaaactcatgtcctcacagatgcctgaggttttctgctagcccagctgatcttgaccaggaatttatttaatgtaactgagtaagtatgaagtcttatcagggctattggagaaaactggtagataaatgtttttatactcaggtaattaagaaaatgaattccaaagtaaaatactctgaaaagcatgacctaaagatactttgtacaatagcatcaatttcttggctatcatttaggccttctagaaactattttcttggtctagacatttactattggctgtatttcctttgtttctatttttcaaagcagtcatacaacttcaaatcgaaatgccccaagctgtatttattctgatcatttctgacattctttacggtaaagtcagtagtgacatttatattactcattccaattacatcatcatttttggttgctgtttttgaattggtaacagtaaagcattccttaatctagtgttatcactccttcctctgcctcctacttcccaatttttaccttaataactgctacataattttttgtagtatatattttcaggcctctttttctatatgtaaaaaaggctgccatagactcacttgtatgatatcgaagtcatgtttctcaagattcccattttcatgatctgcttagccatcaccctttccctgtggcctccagatgactatctattgtttttattcattagaactgcttcagtccttgtggcacagaacacgaactaactcactatgagagatgaacatacttccaaccccaagactacaccaggataatctagtctcatagaagcagggaggcattttcctctattttatccaacttgcactgccaaacaaggtctgggccttttctctctttttaatcctttcattccaattgttggacatgttttccatataggagattttaaaactctgctatttattccccaagcaccctctaattagctatttagttcccattataagtgtgtttgttgccatttaattaagagcagtgatacgacaattccctttttgttttaaaaagatatcacggaaataaatctccctgatcagttatttggttattgctactgttttttttttttttctattcccgaaaaatgggcttgctttattttgctctttttagtctctcacaacaaattttcccctttttttcatgattttcacttcccgttgtaaagttagctcacagtgttgaaatgccctctttgaacacatatttttacttcctcatcctcctctccctgtggtaacccaggcttctctattgtaactcaacattcagcaggtatacagagactgcctccactacgtgggtttcaaactgaataactcattgttgggtctggatctgtaaaaaggtgaaaataaataaatcttcttttataactacaggaatgtattctgaattatctgcctcctactgctgttcccctcacagtgctccaagcctgtgcctctctcatctttccaatactatcctcattggtaatttggcaaattcaggagaccttcgccaagtcgaaacaaacatagaataaaattatcatggaggctaaataagaaaaggctgttgatgttggaacttaagaagaaaaaaattagaagtttaactcccactcctctttttttttaaatgcagcagaatcaaccatatttgggcacctacatatcattcacttggccttgtattgatctctgagggtttttttttggtggaggcgggtgggtaaaggggaactagtaaatccagggcaattcattaatactgtatatcgtccaattgttaacaagcatacttaagccaggtttaaaaagtttctttttaattcaaaactaacatgcgtgctaatttgatacaggttttgtcactgatgggcaatatggagagaatgtaaaaatatctaacttcaaacagaaaaaagaaacaactggaatgaaaagctataaacaataggtaaggaaacacaaacatttacattttaacacagaccaaacaggcaagaagggacttgctggccaaagatatctcatattttgttttacttctctgtttttaaagtatcaggaagttgggccaaatatcaactctcttctatattacatggacctcccaatactgttcttggctagcctgttcacggtccaaactggcattttaaaccaattctaattaggttgaaattacagttacaattcatttacttcaaatccgttaaccttccagtgttgcaaagaaggctgtggagtggaacacagaattcagctgagatgatatttaaggcatagctagggactgtgatcttgccgacaaaaatattacttatttcctttttatgaaaagaatattaccatcagaatccaagacctccgaacttccctgctgaaggcacgtttacgtctttggactctggtgtaccagggcctgaacaagctataacaccatggtattaccaaatacatcctaagtcatcaaaacagctttttaggctaattctgtaagtacagcaaaacacacagcaaacttaaggttttcttagtagtaaaaaacatgtatctctcatactgtaaaaaataaaggtgttccatgggagggaaggagtagggggagaacaggttggggctcaaaataagcaagtagggttattgtaatctattttaaagaaaattcataattttaaatctctctttagttcagaagattgacgtagaggatttacctacagaacttcaggagattcctaagaaggccttcagtgatcttttcatcaatatcatcaggccttatcattgtttcacatttgcttctctttaccatagggaatataataattatttactggttaacttcctagggagattgcctgcggcttatttaagatccaaattttaaagtaataatttctgttgaagctgcttgtgaggtggttgggtgggcagatagagtgaagccagggacacacactaaatgagcccgggatgtaggcaggttttgatgttttgcttgcttttatccctaacattttatcccttcacgtttactgtctcactgaacattttgtctactcttctagttatgcagtgagcaggtctcctccaggaagaagcctctttttatgaggattggggtggtgacagacaataatcaaatggtctgatttctctgctatcctttcctttcccctaaatgttctcaggggatctgcttgaacttttttcaagagctctgtatttggatttttagtagcctatagattatcactcaataaaacaaattaattgtttttaagtgaattgccaaaagtcattttaaaaaggaaactctatggttattatggtttctgctagaaagaattctgacagctcataaaagcaatatgtataatttttcattttttagaagaaaataaatactttcatgtaatggcttgagactctgaattgctccaattcctgaagattatttattaatcatttagtcttttaatatatttgagtgtgggttccctggcagaggagggagttcagaagagaccctgatttcccccccaaaaggaagccacaaatctcttagagccctagtgcattggggcagccaggttttaatggcctttggtggttatcagcccgtcttgcctctgctctttatctgatagtgaccccatggcccaaccctgttgggtcccctctcaatgcgggtgccctaaagagtcatcgctgagtccatttaggcaaagggttagaatgatttaaaagtaaaatggtctcccaaacccaaatctaagtaaacggagggagggaaaaaagagtcaagcaagccaccacgttccttcgttccttctcctcatttccacccccactaaaaaacaaaacaaacaaaaaaaactgcttttagaaaagtgagtggaaaaagaggccaatctatagacacagccaactgcaaatttcgttttgttttagaaatcacaatctaagtgtggaaactgtataaagcttaaaaataaccgcaacaatacttttttaaaaagtgaatattcgtcgttgtaataagatcaagacccagctgaggcttggaactataaaaagcttatattaaattaatctccctttaaaggggacaattatttaaactttttttttagtagcttatctttacacttggaaccacctgccttgattcgccctttaaacgaacaggaaatgacccgcactgattttacttagtcgcatcttttcaaacccaccaaagacaaaacagaatctccactgcagaaattaaattcctactgcttgctgctagtgtagtagggtgattgtttagaaacgcctggggttgttttcatacccctgttgaaggtcaaggtttttaaaggcagctcaaagctttggggatgatcaggggtgaaaagtgaagggagatctttggagccgccgcgctgaagtctccggctacgcgccgccccctcctctagcaggaaagcgggccgctgggacccctggctctccgaaaacagcctcgtcacctttcgctacccctggcttaatctaggtgagctgatgatagcattcagaacggttccgggaaaagaaacaggattcgatacttgcggcttctggcaggagcaggctaaaaagctcagagaactcttcagaaaacttttgcaaacttaactacgcccgctgtggactttggacatgctaattcctatagggcggttagagaaggggaaaaaaaatccctgacagtttccctagttagtttcttttcactgacttgaaggcagaaaagtcttactattttatttcctgatcctttcatctgaggaagacaaaatggtttgggtgttaatccagcggtaggggcagcagtaagttagcagacgggctgtctctgccgggctgggttataacttttcctactttgtatcaaagctaaggcccctgccagggaggtcccgaccggctcccagtggatatctttggggacaccctgatgttttcagccctcctgggaggccgccccagaaagctgagacgagtgcctcccgagggtcgccacggcaacacagcatcccccacatcccaagctaggaagaccgacccggggctgcgggggcccctttccagaatccggccccgcccgcctggccgctgccctcgcggatctcccccggcctcgccggcctccgcctgtcctcccaccaccctctccgggccagtaccttgaaagcgatgggcagggtcttgttgcagcgccagtgcgtaggcagcacggagcagaggaagttggggctgtcggtgcgcaccagctcgcccgggtggtcggccagcacctccaccatgctgcggtcgccgctcctcagcttgccggccagggcagcgccggcgtccggggcgcccagcggcaacgcctcgctcatcttgcctgggctcagcgcggtggaaggcggcgtgaagcggcggctcgtgctggcatctacggggatacgcatcacaacaagccgattgagttaggaccctgcaaacagctcctaccagacggcgacaggggcgcggatcttcagcaagcagctcccgggagaccaacatacacgttcaggggcctttattactgcggggggtgggggggggcgggggtggttaggggaggagggagactaagttactaacagtccaggaggggaaaacgttctggttctgcggatcggcctctgacccaggatgggctcctagcaaccgattgcttagtgcattaaaaagtggagactatcttccacgaatcttgcttgcagaggttaagttctgtctttggctgttagaaaagttcctgaaggcaaaattctcatacacttcctaaaatatttatgcgaagagtaaaacgatcagcaaacacattatttggaagttccagtagttaatgcctgtcagttttttgcaggtgagttttgtctaaagtcccaacagaacacaattatctcccgtaacaaggccacttttatcatgcaaaactggcttcagtcccgaaaagcaagagctgagacttccaaaggtagtgctactaatgtatgtgcacgtatatataaatatatacatatgctctacttcataaaatatttacaatacaatctgtggagaatttaaacacaacagaaatccattaatgtacgctgcagatttttttaagtagccttgaaaatcagcttcagtagttggagcagtgctgagctagaagtacttgtcatgttctctgttctctcaatgaattctgtcaaaacgctcagtgcagaaaattcagcgtttcagagatcttcagctaatcttaaaacaacaatcataagaaggcccagtcgatgacactcagggttctacagctctcccacatctgtgaactcgggtttggggatgttggttaagtttgtggctggtcctctggtttgttgggagttgagcagccgcagagtcacacacatgcaaacacgcactcttcggaaggcagccactgtctacatcagctgggtgactcagccctgactcgggcagcagcgagacgatactcctccaccgtcgcccagcacccgccggttagctgctccgaggcacgaacacccacgagcgccgcgtaaccgcagcaggtggagcgggccttgagggagggctccgcggcgcagatcgaaacagatcgggcggctcgggttacacacgcacgcacatcctgccacgcacactgccacgcacacgcaacttcacggctcgcctcggaccacagagcactttctccccctgttgtaaaaggaaaacaattggggaaaagttcgcagccaggaaagaagttgaaaacatccagccaagaagccagttaattcaaaaggaagaaaggggaaaaacaaaaaaaaacaacaaaaaaaggaaggtccaacgcaggccaaggagaagcagcagaggttgacttccttctggcgtccctaggagccccggaaagaagtgcctggcggcgcagggccgggcagcgtggtgccctggctgggtccggccgcggggcgcccgtcccgcccgcgcccgctggctctatgaatgagagtgcctggaaatgaacgtgcttttactgtaagcccggccggaggaattccattccctcagctcgtttgcataggggcggccggcggccaatcacaggcctttccggtatcagccagggcgcggctcgccgccgccggctcctggaattggcccgcgcgcccccgccgccgcgccgcgcgctactgtacgcagcccgggcggggagtcggaggccacccccgcgccccgcatccaagcctgcatgctggcccggggccccgcccgcgtgcggacccctttccgcagccacacgcaggcttgtgcggctccgcgagtggccacggtccggagacctggaaaaagaaagcaggccccgccggcccgaggaggacccggccggcgcgccgcacccggagaggcccggccccgcgagccgctgcaggcaggcgcagtggccgccacgaggctcccgaaccgggctgcagcccgcggacggccccagatcctgcgcggccgcccagggccaggcctccgcttccagggcgggggtgcgatttggccgcggggcccgggggagccactccgcgctcctgcaccgtccggctggcagctgcggcgaagcggcgctgattccttgcatgaggccggacggcgtccgcgcgtgccgtttgctctcagcgtcttcccttgggtcggtttctgtaatgggtgttttttaccgctgcgcccgggccgcggctcgatccctccgcgcgtctcacttgctgcgtgcgtcagcggccagcgaagagtttcctagtcaggaaagaccccaagaacgcgcggctggaaggaaagttgaaagcagccacgcggcttgctcccgggccttgtagcgccggcacccgcagcagccggacagcctgcccgggccccgcgtctcccctccggctccccggaagcggcccccgctcctctccccgcccccgtgcgctcgagcggccccaggtgcggaacccaccccggcttcgcgtgcgggcggccgcttccccctgcgccggtccccgcggtgctgcgggcattttcgcggagctcggagggccccgcccccggtccggcgtgcgctgccaactccgaccccgcccggcggggctccctcccagcggaggctgctcccgtcaccatgagtccctccacgccctccctgccgggccctgcacctcccggggcctctcatccaccccggggctgcaacccagtccccggatcccggccccgttccaccgcgggctgctttgtggtccccgcggagcccctcaattaagctccccggcgcgggggtccctcgccgacctcacggggcccctgacgcccgctcctccctcccccagggctagggtgctgtggccgctgccgcgcagggactgtccccgggcgttgccgcgggcccggacgcaggagggggccggggttgactggcgtggaggcctttcccgggcgggcccggactgcgcggagctgtcgggacgcgccgcgggctctggcggacgccagggggcagcagccgccctccctggacgccgcgcgcagtccccggagctcccggaacgcccccgacggcgcggggctgtgcggcccgcctcgtggccttcgggtcgcccgggaagaactagcgttcgaggataaaagacaggaagccgccccagagcccacttgagctggaacggccaaggcgcgtttccgaggttccaatatagagtcgcagccggccaggtggggactctcggaccaggcctccccgctgtgcggcccggtcggggtctcttcccgaagcccctgttcctggggcttgactcgggccgctcttggctatctgtgcttcaggagcccgggcttccggggggctaaggcgggcggcccgcggcctcaaccctctccgcctccgctccccctgggcactgccagcacccgagttcagttttgttttaatggacctggggtctcggaaagaaaacttactacatttttcttttaaaatgatttttttaagcctaattccagttgtaaatccccccctccccccgcccaaacgtccactttctaactctgtccctgagaagagtgcatcgcgcgcgcccgcccgcccgcaggggccgcagcgcctttgcctgcgggttcggacgcggcccgctctagaggcaagttctgggcaagggaaaccttttcgcctggtctccaatgcatttccccgagatcccacccagggctcctggggccacccccacgtgcatcccccggaacccccgagatgcgggagggagcacgagggtgtggcggctccaaaagtaggcttttgactccaggggaaatagcagactcgggtgatttgcccctcggaaaggtccagggaggctcctctgggtctcgggccgcttgcctaaaaccctaaaccccgcgacgggggctgcgagtcggactcgggctgcggtctcccaggagggagtcaagttcctttatcgagtaaggaaagttggtcccagccttgcatgcaccgagtttagccgtcagaggcagcgtcgtgggagctgctcagctaggagtttcaaccgataaaccccgagtttgaagcccgacaaaaagctgatagcaatcacagcttttgctccttgactcgatgggatcgcgggacatttgggtttccccggagcggcgcaggctgttaactgcgcagcgcggtgccctcttgaaaagaagaaacagaccaacctctgcccttccttactgaggatctaaaatgaatggaaagaggcaggggctccggggaaagggaaccccttagtcggccgggcattttacggagcctgcactttcaaggacagccacagcgtgtacgaagtgaggaattcctttccaccaagagcgctcattttagcgacaatacagaattccccttcctttgcctaagggagaaaggaaaggaaacattaccaggttcattcccagtgtttccctggagtaatgctagaatttacttttgtcataatgcaaaattaaaaaaaaaaaaaatacaacgaagcgatacgttgggcggatgctacgtgacagatttttccaaattttgttgcggggagagggagggaggagaattgaaaacggctcacaacaggaatgaaatgtacatttctgcagtggatttaaaaagtactgcttggttagttggaagaaaaataatttcattggaaaacagtaacagtgcattgacgtttttcttctacaactttaggtaaagaactataggtggtctcagaagataactaaatcttttacctttttgctctttcaaaagcctccccaaaatatgcataaagatgggattagaatctcaacaattctcttaaaattaccctttgcgagcaatatatttccaaaatcacatttgtaaaaatgcagtacgtctaaaagaattatttctattttaaatgaccatttacattttaaaaaatagaatgtatcttgctatggtttggaaccaaatagctgcagtttgtattgatgtcacagggatggaaaacaattttgatgaagagtaacatgtatgtacaaatcacctgccatacacactatccagttttgaacattggaatttaattaaacatttttttcttctgaagtggctttgagattacttcacttttcaaatctaattactatgagaggggggaggagagcccttagttcttccattacatccttcctccatctgaatgtttctgtgggatgctatggttaatgtgtgatgatttcactttcacttcataaacccattgtgtacctcacaagtagcaagctgaggacattttaaaattaatctttttaaaatttaggaatgcttagtaaacattttactctcataaaaatcttgcattaccactgctataacacaggtaataagctgggctgtgagggaagccaagctctgttttgtttttagagagttgtatagaggcatttaatagcatcagaatgcacctatggtaaacgctgtagaactgagggtatcatttaagctttcattgaaatattttatatggtataacatttacaatatggagaactgcttttaagtatattggaatcagcagaaacagccttaattatttggttaaattatatcacaagttatacatagagatacatagatataaaatcatatacacatctatgaaggtgtgtactttatttaaaaatataacttggaatttaacataccgtggacgtctctagaaggattcattccaagtatgcattctgaaataacagaaagtaggaaaataaaagtaatgcaagtttaaaaattaactttcccccgacttttttttttttgctagctcatttcttcttacactttttagcactggagatttttatagctttgacacaaaaatgacttgaaatagtaaatcaccaaataagaaataaactgttccttatgcacgtggttttaggtaccttcaaccaatgttctccttcactagctaatactgaatatctgtcatagaatcacctcttttaagctccgtgtgtgattaaaatgtgatttatttaatgaagatttaaaatatatttggaaggtgtaggaacattagaattcaagggaaaattaaaaccaaaccctaacttaacgcaaaaacatttatgatcatttacttccaatgataggacattttagaaacattttcccctgcttactctccttcccttctctctgctaggcaggtaaattatttacatcgaaacctctcacaagttctaatagattatatcaattattattagaaataattgttacatgataattcccaaatatggatcacttacagtatacatttacaactataggtaaacccattaagcaaagtcacatgaagctctttttctttcctttgaatatctacatataatgttgtgaatttgaaattactctatcagccttgtatattgataacagcactgagtcacaaagaggaaatactgttctttaaagacaggatttgagcatttcaaatgctgcagacctaaagctttcaactccatgccacaatatttagtatgctgtttttttttttttaaaaaaaaacctttaaaataagaggagacaattacttcagatttctagatgctgtttaaataggcaggaaaacaagatttgcagcttctttagtcttatatttttgccaaagtaaaaggaacaactaaaataagaggttctgaaggactgctctatgatgaaatattaaaggaattaaatatgtatagtctcaaaggagcatccaaaaaaaaacgagattgtggttcacaagtagataaaatgactccatgaagacttttctttttaaagagcaaggcagagaactaatcatttgcactaattgtgaatgataaggtaagaaataataaatgtatcctgaagttacgtcagctcagctttaataggtgttggggcagtggggtgggggtgtggaatccacaacggtaagactgaccagacagcacacccagcggaaccacgcaccctggaaattatgtcttgagacccagagaagcttttccatgtctgagtctaagaaattggagtaggagagcaagaaaacacaagttcatctacacacctaatagttcagcaattctgaggaaaatgccaggattttttaaacccaaaaacaagggcaaaaatgagtggattttgaaaactgtgattggtaactattaaaaactttcttagtttgttgtgtatcagcagccttgagaacacagcaagtgtggttaaattggggagggggaaggggtagggggtgagcaactgctgcccaggtgaagtagcacctgtggaggtttgaagtgatttgcccatgaaactgttaaagatgccagaacccaaactgcaagagaggggaggttgcgtgtgtttaagacagtgaacaatgaatctggtagcccatcctccagtgtgctagcttgcatgctctctctctgtctctctcttccctacatcccccattgaatgtaattatatgccaggcaatgggtgaagtgcttttatatactttgcctgatttaatcctcacaagaacatcattgctacccccattttacagataaggaacctcacccttggagagttcaggtaacttgcccaaattcacatcactcttgacctacatagaaacacacacacacacacacacacacacacacacacacacacacacacacatattcatatctacatataggtccacatgcatggtaagctatgttccttttggatcatgattatttttgtggctatccttggtagagttctaaaaaattaactctgatctcatctttcacttttatcccccccgtctcagggtctagatcagaaaatatcttggaaattcttcaccatgcaaacctcatatcattaggagtcagattttaatgtcatttctgtcatccacagagtttgaggagaaagccaaggtccatttggctgagaagcttttatattgataataatataaaatggcgttttagtcttttcccacctccactagtttaaaagggcatctttaggactttcctagatacaaggtatttgattcacctgccttcagcattccttgaatgcttcctctgtcccaggcaaggtgctaggctcactgatgacaaacaccaaacagatgagagtaaagaagtgtcatggctgttggtggacacatgtccagggtcccaggaactggtgggagggaatataagaggaagaggggccaacagcccctggtgggctcaggaaagacttccttcctagcagaggtgatttttgacttgacttttggaggttgggtagatttttaggtggttcaaagagctagaggaggggtttagggaggtgacggtggggtggggaaatggtgctctgggctgaataagcatcatgaataagggcgtgagtttatgaaacacatcagtgtgtcagttccagtacagttggggcataggtttgagaccaggttggggagtgggggagggagtgcagcagttcaaaaatacatagacgtagataggtcattggaagcacaagcaacctgaggaaatgtgaacttcaacatgcgggaaaattgatctgtcaaagccaaacagggaaataacaaaattaatatatatattagaaaaataagtctgtcaacaacagctcggtgagttggagggagtagagatgaggagtggggagctatagcagttgtcagacaaggggtcatgaggatctggattaagcaatggagatggaagaggggattgaggtgagggagggggaggagtctccccagcatctgtcctttaatagtagtagagaagaccagaaacagcgggtttacagagagacatcgtgatgtctctctgagctttggatgcccagaacagaataggaggtgctggtggggaaaacaggaattctggggagaggtttcatgtagaaataatgagctgaacatccttagaatatctattgtagtttcagattgtatctagggtacaatcaaactctatgctagtttcagagactgtttccagtgagaagagaccattctcaggttctgggattatcaacattccagggtgagcagaagagggagcaaccaaggagatggagctaggaaaagaaagaggagagaataagtaataagagtaaaggaaaatgcagccgggcatggtggctaacgcctgtaatcccagcactttgggaggccaaggcaggtggatcacctaaggtcaggagttcgagaccagcctgaccaacatggtaaaaccctgtctctactaaaaatacaaaaattagccagacatggtggtgggcacctgtaatcccagctattcaggaggctgaggcaggagaatcactagaacccaggaggcggaggttgcagtgagccaagattgtgccattgcactccagcctaggagacaggatgagactctgtctcataaaaagaaaagaaaagaataaaggaaaatgccagctttggaggaaaaccatggcccaaaggccacaaaggggccatgaaaacaaggactgaaaatatgaaaatattccactggatttgtctacagagagtgccatgtaacctttgccaaaggagcttcagttgagtggcagcagcagaaatggagcagagagtagaaagcgaatgggatgtagggaaggagagaatgaaatttgttggaggagggagggaaactggtgaggtagcaggaggagagaaagaccagtgttgagaggtgtttgtgtatatatatgtgtgcatgtgtgtaagatggaagcaacctgagaaaattagtgtttgccatgtgtattttactgaaaataaaattcatcagtttccacttcaacccaggtcttcctcttgttttccccactgcaccatcattctcccagtttccagacttggatccatggattgatctttgccctcatccagtctgttgccaagatctctttttgatttctttggttgataacaattcggcccccacctttcaattcctattgacatcattctggttcaagttctcattacctctctgaagatttcttacaaagatctctgaaaaagggggttcctgctaattgtatacagtacttccagattagtctcctgcaccatagttctgctgtgttctcctgggcatctggaattcaatgcaaggtctttagcacagttctgcaggattaagagctacccttcctgtcctcatcttggaggggggcagatccttctgcctcaggtgaaattgcctcttaaagaccaatcacatgctttatcatcatttccacatctcctatgtgacttgaattataatatattttgggttatagctatttaaatatattgggtggtggggcgggtgagaggaagtggtggaaccaccccttccctggcttcaggtttccatgtggaacaacattccttagtgtaaaactcttgacctctttttacaccctcattcctcctccaccataaaagattgaattacctagttagtagcgttggaagcagaaactggttgtagaaggcagaagcataaaatgaacccctcaaactttccaccctaatccctggggctgggaatatgatgagttgtcatgctctggttatgttacatggaaaaaaagagatttttttttgcatatgtaattaaggttactaatcagttggctttgactcatgcaacagagagattttcctggtagccctaatctaatcacaggagaccattacaaacacagtgttttctcaggctggggcagaagtgaagtcagcattgtagctagaagacagagcaggcacttgcaagaactagagagcagtctctagatgccgagggtgacccctgattgacagccagcaaggaaacgagggccactatgctacagccccatggaattgcattctgccaactacctgcatgagcttggaggtgaatttctccctaaagccttcaagtaagggctcaggttatccaacccctggatttttggccttatgaagctgtgagcagagaatctagtacagcaccaccagatttccgacctgcagaactgtgggctaaatttgtttaaggtgctaagcttggcaatttgctcgttttacagcaataagaaaacaagtaccctgggcatgctctttccctctccttattcttttggggagacactgcttgggtattggtgagtgagtctccctatttctggagctcagtagcaggaagccacatacctaagccatgctctccaaaagttctatcagtgaccaagctggtatttttatctccatctgcttgactcctttgtcatctcactgttgattgtggatcaccggagagcaggggtgttttttattgagcctcctaacagcccaccagataattgtcttcatctctctagattcactctcattcccacacaaacgcaccagtggattgtgaacaccttgccagcgaggctgtgttttactcacctttaaattccctaggcagcactgcagaaagtgaatgcgtacctgagcccctgtgagtctggttaactacagattctgcctcagcaggtctcggaagaagcctgagattcttggtttcccataagctcccagtgttgccactgccgctggttcaaggtctgcactcagagttggaggatccagtatctcagatagaactttttatttttattttttagacagagtctcactctgtcacccaggctggagtgcagtggcatgatctccactcactgcaacctccacctcctgggttcaagtgattctcctgcctcagcctcctgagaagttgggattactggcacgtgccaccatgcccaggtactttttgtattttttgtaaagatggggtttcatcatgttgtccacgctggtctcgaacttctgacctcaagtgatctgcccacctcggcctcataaagtgttgagattacaggtgtgagctaccacgcctggtgcgattggactttttaagctgttgttatggcctgaatgtttgtatccctccaaaattcacattgaagccctaatcctctatgtgctgctatgagtaggatatgtgggaggtgattagattaagatgaggttgtgaggctggggtcctcatgatgggattaatgctcttataagaaaagaccagattgatctctctctctctctttctctctctctccctccctccctccaccgaacccaatcgtgctggtaccctgatctcagacttcccaacctccagagctgtgaggaaatacatgtctgctgtttaagccacccagtctgtggtattttgttatagcagcctgagctgaccaagacaagtatggtaatagaagtcaccagtacatcttctatcaggcctcacaaggagctgctttacatacattatcccatttaattcttgagcagtgagtggtccatcattactcccttcactttacaaatgaggacacttaagatttagtaatcagctcacccattctcagcccatgcagtttgcctgcagagtgcccggttgcagccagcagcttgcaagatggtcaaaacattgtattaccagtcaaatttccttattagatcctgacaagttgcctttaaaccattaggacaggctgaattcagaggctcaagcttctaactccagtgctttggaaggccaaggctggatgattgcttgagcacaggagtttgagaccagcctgggcaacatagcaagaccccatctctacaaaaaacaaacaaaagctatgtggacattctttcttattctagagcagcacatccaatagaaatataatgagagtcatatacataatttaagattttctagtagccacattaaaaaagtaatgggcaaaataaattttaatatgttttatttaacccaatctattgaaaacattgtcatttgaacatgtaatcaatatgaaaattattaatgagctattttacatttttcttttgtttctgtactatgtcttcaaaagtctgtgtgtattttacatttatagcgcatctcaatttggtttagccacattgcaagtggtcaatactcatttgtggctagtggctaccatattggacagtacagttctacaggaaccactcaaaacacaattcaccctggatagcaattttgctactagtctgctagtgcttgagtgagctgtttttaaactgctgttagtgaggaccactaaatagtgcatcttacttgactcgtgttttccctctgagctgtcctgaagcaaagttcagaatttttattacagcatgacttgattgactcaaaggtggaagaacacacatactcagcagcaataactgagttgcaaaggcctactaaccactgacaacaccactaatgcatttttacagccatggatagccacaagttaatctcacacattgttcatttccacttaacattcaccagtcatgcatgcctcagcctataaaacagtgctttggtttccttgagctcggaaacaatattacaaaagcatctcctgtccctttcttttccagcaaaaccagttccctatgaaacacacctgacgtatttttaaatataagcattatggatcagaaattggaggttctatttttaataggccatgattttaaaatagaatttccaattggttaaacgatactcactctcaaataggaattcctataaacaggtttattttgaaatatagcatataaatttttcaaaaagccatcaatgtttcagtttgctggcaatctaccagttaaaacacagtaatagatcaattcagtgagggagctactggtctaatggtctaagctatggaatccatcctcatcagaagaaataaccaaggagcgggaatgtggggagaggttcacaacagaaaccactgcccctacttgcctgtgttggttcttaaggggctgctgggaacccctgaaggtccaagtgtctcttttgtgcaaagataacagtttctggctggtcacggtgggtcacgcctgtaatcccagcactttgggaggcagaggcgggtggatcatgaggtcaagagtttgagaccagcccggccaacatggtgaaaccccgtctctactgaaaataaaaaaagtagctgggcgtggtggcggcgcgtgcctgtagtcccagctactcgagaggctaaggcgggagaatcgcttgaactcggaaggcggaggttgcagtgagctgagatggcaccactgcactccaacctgggggacagagccagatccgtctcaaaaataaataataataataataataacaataccagtttctatctgttagtcttacgggttgaagacagaggttaaggggccaacgtgtggaccctggaaagggtgtgagcccttctccacattctctttggtgtgggcccttctccacatgctctttggttccgtcagctacagacagaggttatgttttaagagatagactgagaagtcactctccacatgaaaccagtcttctcttcgagtgatatccttcagctaagcattgtgagaaagtatccaagtggagcatctgaaaattgcgctccagggaggggagtttagggacttgtccatggctttcagttccctaattggcgaatgtcacactagtaagattttctggtggatgatagatgcagagtctataaagttgctaatacttctggagtctgctttcttttgtaatctgctttatttgaggcattttagttaatatatttaaagctatttccaccacaatgaataggaaatgtgacatgatttttctaagttgagtaaaaaagaaatgaatgaatgtatgaattgaaagcaggggtcctgttcctcatgtcccacatgctatcccacagcaaatgctccttcccaaacagaatcatttatttggattctttgtgtttataatttactctttcactaggagaattatgagatagaaagtattttttccttaagcaacttttgtgttcaaaaataacagagtgattttaattggttcttgaagggaggagggtaggggattaactgcagaccagcttgataagacgacccttggtgagctggtagagcagtaggtaggtctatgttagaccttaaatgtggacaatggtgggtacaggacaggcaaaggaaataccccaaagctggctgaaacagcaaatttctacatggacaactaattcttggatacttggagtaaagacatcaatatatattataaagacataaatacatatatattctatataaaggtatacatgagattcacacacacaaatatattatcttcaaatgatagctaggtaatcattcactcagattccaaattcaaaatttaagatttagagttattgatgactggattaattcatgcaattaacatgaaccccaatatatttgagtgcaggagtactcactatctcataaggtagaggaacctgtaggaagtttgttactagccatgtgagcaagttagttacttaccttgccccagcctcagcctcctcatccacaaaacaagaggcttggacaaggtgggttttccagctccaggaacatttatgcaaatgccacttggaattgtgggaaatcggcccgggtctggtgcttacccatgtcagcatatggctagagtgaacttgggtttcgagtgggaaggggccaggaaggaaaaagaggacccagaatcaactagagataggacattttaaggactttcccatttcacataggttttctctaatttcacataagtattgcctgttttaaaaagcagattcaagaagatatgatttaaaacaagtatacacataaaaataactctgagattctgcatcttctagaaaatcacagacatgttgctatcgtattctataatttacatggtgattgagaatagacccacagttactcagtgttatccaaaataatttattattataatcactaaaaatattacaattcagctctttgattaattctgtttactccatgcccaccaaattagtgaagtttcactatgtatattacaaaataatagtttaaaaataatatggatgtacaatatagtttaattcctattcaataaacagataagcttcattattattattacaactgttactacctcaaatttgtgacttttttactaaaataaaatttttcctatttatgatcccatatagactatagagaaatttcccacaaacatagcagaattccttagaaagggaatatagaagctttagctaaattttgggtgccgaatcacctatttgttttgggacatagaaagtctactcaagaatccagagtaagaccttgatctcagtcttgcttacaaggtcttgatctgtgaaggaagtgctgagatatctacatttgtcaattaaataataaattgccaaatatcagccttagagtattctataggcactcggataagatggcaaatactttcatattaatcctgttatcttcaaatttggaaaacagactgttataagaaacagttggctaagactatcaatatcctgctttcttgtggggtcatgaaattgccatagtttacaaaaactttaaaatttcatgttgtagtctgaaataaaaaatagctggaaaaagcaacaatagaagtaataatcctattctctaattacgtaattatattttctaaatttcatgaaactgctaagatctgtattgtaatggttacatattttcaggttacattattactattatacaattgatattcaataaatgatacctttttatgggtaatacattgaaatggaatagtaaacattttttgcggagacttctcataaaacatcattgtctacctctcaaacaatagttaagtgagatttaaacttttttatatgattgttttggacttgcttagaaaaatactaccatttaaaactatattctaaaaggtaaggcaaattttgctagaatttttgaattaaaaaatggtgatatttctgtagagttatctttttgaaaggtagagagaaagagtggaaagatttttttaataaaattaaactaaaacatctgaaaatagatatgacttgatagctaatttttaatttatatttatacgtgcaatgaaatctatattcagagatcatccaaaaattattagaaacatacaaacaacacttgaaaaatgttatcacatatttttgcagagtaggttgttttgaaaacagccagagcaaagaaacagatgatcaccaaaatattaccacaaatgagcccaaaaataaattataggtcatttctagttgaaccactgaccaattagtgcactaatcttaagtaactacatagcacactcccatttttttctttcctagttatcttaacaattcaaatgcatgtgaagatacccattttgaggagaatttaaaatgtattattggttgatacagcacttctaggtaagttctcaaggggggcctgcagcaaatatttacataaatgtggactttaagattgtttcagaagtattctgttttaggaggttctgtaattgtcaacttctcggtttaggaagaacctcacgttttagagaagaatattctagatcaagtctttttccttaatgcagaaatagtaaagtttctaaaatagaaatcattttgtttagccttctctttaaccaaaaacaccaaataatgaagtagacttctaaggaggaaagaagaaaactttaccaaatatgccagtgggggctccacttttagtctgcaaacctctacacctgggagctgcgctgtcaaattgagtcaggtcctgattgagctgaatgatagacacatagtgcccagacaccgtgcacagtgaactcactctaggagacccgcacgcccccttctcccaattcacccactgctctggaggtcattatttaacaccggcaaattgaacgacaacatgaaatgaagtgcaagatgtagatatttcttccccctcactaatctcgctcacaagagaattcattcttttctttttgcctcaggcatatccaggctagcaattttcattttgctacctaaatgatttccccatcccccacctttcccaattagagtggaaatggattaagacttcaggttaacccctccgttactgggaatgagaaggaaataacgttattatgtgtaagctttattttcaccgttgtgtatgatgctcttttctgatcatggtaaacacagatttaattaatcccactctccccaaaagacattcctttagtgaagatatgacactgccttaaggtaaagagcaagagaaaaacttctttagccagaatgttattctgttaacttgtcatctttaaagtgttctagaatgcttatgagtaaaattaggaaatttggatacaaagtaggaagttatatggaagcataaaagcacattggttcttcagttacagagaatggatacaacaaaagttaatacttccttggtttttactaagcttgaaatatctggatctaaaaaaattaagtgtgggataaatatctagaaaatgctggatcatctgaaacttatcacgtagcttttccccctacagaacctaaaaataaaaacttctctagaaaaaaagcatcctctctttactgatctttaaaaattttaaatgttgaagccctgagtatgtatacctcacataactcctctatagcaacctataaaacaagaatcctctctcctggtggtctgtttattttgctatgaacaaaagggaaggagcttcagtatttctgaaaataacctgaattcccctttgagacaaagttttggattttcgaaagtaaatgtggtacttttctattttttaaactaatatataagtgtacatactattggctttgttggtcaagaaaacagtttatcataccaggaagagactgggtagcagaacagcagcctacgaatgcattagatttgggttatgctgggttttgacaggtttgggggtttaagaaactgggttggttcgtcactaggaatccattaagtgttgctagtccgtgaggacagagaaagctgtggaattcattcctcaaaagcaaaagccttatttgtgctaatagggttataacaactgagcaaattttagtggacaaatagtagaggtccttaacatttactgagctattctgagcttcagacattgtggcaagggctttctgtgcattatgtcatttaatccttttggtaatactattaatttaggaacaattatcccctaaggcttaaagaagttagacaacttgcccaaggccacatagagatggagcagtgaaagtaagaatttgacccagtcagtgcacagagtagacaatctttgaattacatgcatttaaataaaaaaaggctgttcttcatagttctcattgaataagtttcatagacaatgactttcccaaaggactccttttgcttctgaagggcagccactctccagttaaaggggatttgcaaacaggcccactctggattgcagtacaaggaaaggaactgctttagaaacacagaacccagatagatggataaatatttcaatgcctttccagaatagtacttaagaagcagagcccatctcagtttgggtttgagcccatggccttatggtttaaatataaaatgcattaaagctctttatttagagagtcacgtgcccttttgtgggagcagccccaattctccctctgactttagtgagtgtacaatgcaaataggtgttttgatattgtcattagtattcattattcatgaggacttgatcgtgtattcaaagtcagccaggagggtcatgtgcccccttcagtgaaaaccttgactctaaggacagcactttcctggtgtacagtctttgggggctcttgacagcaagaaaacctaaacaggagaatcccacttagcatctgcccacaggtaaggggcacagagaaggagatatagacttctaatttagcaaaaagaagtatgctgccatgtgaaaagtttctaaacagtgacttctaaacaataggttgtgacccatagattggttgttaataataataataacaaaagcaaggtaagaagaagaaatagaacagaataactggaaaatagagtgcttcatcagtagtaagggtgaatactgcttcctgaagctctttttttgattgatgtatctcccctgagccctggcatactatttacttcttactgtttcttgctattcaaaaagtttgcaagcctctagcctaaaatgtcttattttcttagtactcaatttgttacttgacttggtgtttggctccctgtgactctctgaagttctcctttctgtgcctccgcttccacctttgccaagtctaaaatcatgccatgtaaaagttatcaagaaaaccaattaaatcataactgccgaagtgccttgtcaagctaaacagtcatgagaggtgaaggattattatgaaataaaacagagtgaagctgttttgaaggccatccttctgtggaatagcattgggtcatttcgttcagaggcgaaaagattcttagcaaacattgggtcattttgtttagaggtgaaaagattcttagcaaacattttgtccaatccatttagtttatagagggaaaaggaggctctgaaaagtgagtggctcttctaagctcccgaaacagtggctgatctgggaccccctgacctgtgaatttgtggtccacccccatgctctgccactcctccaagagccgttttgctacttctttaaaaaagggagggtcttatgaaattgtatttacagaaaatttacaactcatgcaaagctaaatggatttcttccctttcaaagtggtttcctgattgcaatcacataaattaaactccagccccaaaaaagtcattcgaacagagtaatgatacatctccaagaagagatacagagaattctttgaaattctcaagaaataatgcaatgagatgcaaaagggtaactattattaatcttcttcctgaagtgtcaatcaggaaggtatttttaaattgtattggaaaggaagaagagacaatgtttcttcccattaatgatctgaactgaaagtaagggaggaactaaaaaatgtgcaaaatgtcctcggggaaaaaaagtagtataaaacatagtcttggatgatacagcaaggtcgttgctcaattttatgttgtaacactattttaactgtcaccaagggctgggatagcaaatattgcatcaactctgcaaggtgtttcctgggttttgtggacaggggggtcgggggaggtgcaatctccattcttgtgaaggccagataaagacttctgctgcaagccactatctttttgtgctgaagctgtagataacacagtttcacaccctgctgcccaagtcctgctttcccaatttgtaggtctttattgcaaaagtcttttgtgtttgttttatcagacacattttatcatccttctccaaacaccctttgtcaaagtcagcctttgaacttcttttgcatatacatagaatgggaccaatgattcaggatatgtaacaggcttatcttataattctaaagaaagaggaacagagccattgacctttcttctatattttcttggggctggtgtgtctgtgtgtgtgtgtctgtgtgtgtgtatgtgtgtgctaggggtaagatgtacaatctcattacctttagaagataatgcaatagattatcctataccaataatttatgccttttagttttgcacaaattaaacctgaatcttaaagttcaacttgtctaggattgtactaaaggccgcattgcaggtagggctaatttcggggtctgatccgtgtggctccccatgctcctgacagtacaccaggaccactctgtgttcactcccgtgtgcagtccccatgctcctgacagtacacccgaccctaagattcttgcttcgcttgcctttgatatggtgatctctggaactgagtatcaaaccttgcttgaggaattaaaatgcttgctcatatcacttatatcttttaaatgtggaaaacagagagaatccacttggagcacatcagataggtttattactttgttcctcccttgtcattttttgcatgtctcacatcaaaccctcctctgcaacagtgaaaatataggatgggatagatgaagaaggtggtactccttccttctctgggcacagaggcaatttctcagtgcagctcacatgtggctacaaacacagagtatcactttcttatacagaccaggtcactgttcctcaaaaaaaaaaaaaaaaaaaagatggtgttctatttgataacctgcacttctccagagtgacctcttcagctgagtctggaagactgccttaggcaagtcccccgggtctctggctacagagggccatcctccatgagagatgagcttgtttcattgttgcaaagtatagccaagctgatacattttagcaagactaaaacttaatctttagggttctgggtcctttcatcaaatttcctctgctcacaccatgatctccattgtctcctcctcctcctcctgctcctccagttcctctttcctttcttcttctttacctcctccctccttgcttccttccgcctcttcctcctcctccttcttcttcaactattatctaccaagctgtgcctgggctgcccccagtgttttgcagtgtgaggaacttctacaggccagcttggccactgaaagaagccagtgattaatgtagttttaaacaaatcaagatttgcataaattggctctgaagtcagcttctacaaaccagctggaacactcgccatattcctagttcagtgctgtcttcccagtgggttctcagactttgcagctcacccttagccttctgttgcagggaaaccacatccatgtggctcccagtctctggcaagccagcaaagggctccaacttctcttgctttctccaccttctcctcactggctggagcactcaggactctcccaggtcctatttttctccttttggtaatttcctgatagaaactccagcaatgaagataattttcagaactgttttttttttttctggtacagaattcattttggcttctgggaactaagaaacaaatgaactgtctttctgaagtcaagaactgtataatgaaagctaaatgcagaggcaaaagccactgtcggttgccctttgtcctctctgtcaccagccctggacatgagggtgagacagaaagcctcgctcttccccagtgaaaccctgcaattgttctgtgccagatgaagccctcttcagatgctggacagggtccaggtgctgccctgtgagtggatgccagcctcagtcctcatccaggccaggaccatgtccagggcgggcttgctcctgaatcacatgcttccagtcaggactctgaatgcaaatgctggtgttttgtattttttgtcgttatgttattgttgttctttttttttttgaaacaaggtctcactctgttgcccaggctggagtgcagtggctcaccgcaggctccagctcctgggttcaagggctcctcccacctcaacctcccaagtagctaggactacagacacacgccaccacaccccactaatttttaaacatttttagacatgaggtctccttatttgccccagctggctgtgaacttctggcttcaaggtgatcctcctgcctcagccttccaattagctcatactgatgttttatttaaatatcgcataatatttcagtaaaaggcctgcaaagagggcacagaaagcattttttggagttcactgggggcaggacgagctatcccattaggtgggaaggggtctcttcctgatatgcatcatacagctgcttctagtggtggtacaggacccaggagaagaagagtaggtgcttaacaaatatttgctgaataaaggttgatgaaaatcaatgtcgacaatacatttattgggatcaggtaaggaacaaaggtgatattaacaacagctgccacctgcgtctattaccagacatctcatagatagcaaccctgggagggagatcttacatacatgaggacagaggaatgggagatccaccaaggtgcctgacagctgcatttgaacccatactcagatagaggaaccctctgcagtctgctcagggttggagtttgtggctgggagaaaagaggaacagcctctgcagccaaccctcctgggcagcgaatgtctcctccccacactgcagtgaacccctggccatccttccagctctgcccttgccccactccagtaaagcagccagagagtgatacacattagattgtgtctctcctccacccaaactccttgacggctttccagggcactcagaattccaggccctggaggaaaccagcccagcccatcacctagacctgggagcacctgtctccctcggcttgctctgccatagcctctgtctgtctcacagacgcgccaagctttttctgcctcaggaccttttcaggggctttccttctgcctggaccactttcctgtctctaaactcccccagttttccccatggctgctcaaccgtcatctactaaagtaatgggtaaagtaaccccgctccctacccctgaaccatcacaactatcatgtcacatgcacgggtttcttttcaccattgcatttgtcttatttgatttctgtgtttatgtatttgttgtccatcctccaagtgacagagggagtggatggagtgaaggataagttttgtcctgttcactgcccagcatcaagaaaagtgcttggaactgagtagatagtcaacagacacttcttaagaatgaatgaatcaatcgatgacaatgaactgtagctgccacctcctccagcctacgtaccctgaggcatcctagatctcagagcaaggagatgatgactgccaggcattgagtggtgaaaaaatattttcctttgctacttactcttctatcactgggtggcagtaaggctagaagcctgggaaatctccatcacccgtcctctctgttttgcgatactcttgggtgccctgagggctttagaggttgctgcggtcaacaacctaagcaaccacttctgagtttctggcatagtggcaaccacaactggccagtaggtcgaggaggcctctgcttaacatattgcaccgatgttttggttatgcaaatatatggtttttctcattccgatggaaaacatttctggccaagtcaaaactacagaaacacagcaaggaagactcatctatatagtcccctcagtcccattgccccagcctgggtccctctttttacaccctcagaagactgttcccattgccttcctagtctttgagatgcaggcatttggaaagcacacatctgatgcatacctgaaactccggatcagtcacgtaattgtttccagatatacaggacatgtgtgatgacagataggatatgaacagatgagtagtgattggatctgagctcaacattccaaaccgatgcaaactagggtgtggggagaagcccctggcctttcacttggggtggggctggggggccttcacctggtctagtttaatctagaagcaggcatagaaatggcaggagaggccaggcgtgatggctcacgcctgtaatcccagcactttgggaggctgaggcaggtggatcacttgaggtcaggagtttaaaaccagcctggtcaacatagtgaaaccctgactctactaaaaatacaaaaaattagctgggggtggtggtgggcacctgtaatcccagctacttgggagggtgaagcaggaagaattgcttgaacccgggagatggaggttgcagtaagccaagatcgtgctactccactttagcctgggcagcagagggatactccatctcaaaaagaagaagaaggagaaggagaaggagaagagaaataatggcaggagaaggagggagcagtggctttgcgtagacttttctctgggatgaactgggctcaggaaaggaagaaacctgttgggttctgatgcggggctgttcacccacaaaagaatggagaggtgcagatggaagtggatctcctgcagagatggtgtagagacagaatggaaaccccaggccaggagtgtcagctttgggaacagtggttggtggcatctgcagccttctgcgtcagctggacaccacacgtcttaagcctcgtcaccttctctttacttttttgccccttcaaactcacactaatttcagttgagacagggcagaatgcatactttgcaccaccctatgccacaaggtttcaatctggggtgggcatggggaccctttacattgtattctttaataattcacatggcagcatcgtagggctacttttaattgcttcttaaaagtaattaattgattttctgacgtatcagttaacaatgtattacactgacacgaagttgtgttttggctcttgattgaaccgagggctgtatggattaaattccacccagagtttagcttaggagactctaaaaatatgcctctataaaaggaaaggctttttacatggcgtgttgtctaaaaatctaaaccatatgtcctttccaggctgtcaatggggtaaaatatgggttccagtgtgtgtagctgctcagacttcgaacattcaggaggcataaaataacctactgttactcaatatggccaacactctggattaaagtcactcaggctatgccgagggaattctctctcagtcagtgtgaagcaggagccattccatcaaaacgtggtttgctaaggactcttggaaggaggcaaatatgagctttgttctgagagcggctgtctcctggcaggagctgagtttgtctgtagctgagtttgcaagatccattcattgacattccatgatagaagaattatacacagggaggattcccatcaacaatgcagacactattaatggggacgttaagaccaagattagttaagtggcttgccctgggtcatgcactgagtcagtggagcattaggaacaaggacctcctgacattttggcttctgtagggatttgtgtggcaattctgtgatgaggatgatattgtaactgccaggaagtcaccatgtatatttcaacacctactgtacccacaatatgaatctcttgacagggtcatttcacggggggcagcatttcttccccacttctgggagctatcactctggcctttctccccttcatatggtcagttgggcgtatgggagaaggaagtggcaactcagggaactcagttccctcctccctccctccacttggagctagtgcctgcaggaagcacacattctggtcagtgtcttcatgtggcatgttttacactggttcaactgcgcctgagacaggtgagagaattcagcattgggaagcctgtgtggctgcacttcacagccccattctgcaacttggccttgagctggcatttggatctgcatgtgtcccacttctttttgcctgtgtcctaattgatttggaactcaagagggctgccattcattgcatgtccttcaatctgagtgtaaagccaggacatgtgatgatggcagaacgagcccacttaaacctgatgcacagtgagctgaggccttgcttctcagctgtgttccttaccttggcctggtcattcgtgctcagtttcctgaattatagaatgaggataacgattcctcctttacagcaccgttatgaggactaaatgagatattcaacgagaccgcttttagactttgtttaccctagcagttgcccagttaataggacttgaactttttttttaattgcaaagtaccagaagaaagatgtagaaaaagtgtttaaaaaccttaacatattatgctatttgatttttcaatattttggaaacatcttaaattctgaccaaaacttacaggaggaaaattgaagggaagaattaatgactatgtggagacaagggagtgcaccctttatgaggaagaagaggtgtgtataggaagcacttcacaggtaaagtcaagctcatcactgatctggtcctgctgagctgaggacaatacttgacattcctctggtaactgtttacatgaccattcattcttccttgtccagcctaaacacaaataggcaaaaagactcatgttcatggaatctgctttaattgcagagaatggttgttttatgagcctcaaaggggaaaagcattttaaaagcatgtgaagaagcattctatgcaaatgtaaaatattattaacaatcacatgactactttgatcatgtattttaacatatttgttgtttcttggcaaagtggaaggtgttgtcagaccagaggaataagtgcaagagatcaatgatgtttgggtgactcattttataattatcttcaaactttaaggcttgcaaattccatttttcctaggtcagtgttattttgctgagatagagaacaaaagttaacattatacaaatatgaaaaaagtattctctggggtctgaagtgctgaatatcaacagcctcttcacattcctcgtttttggaagtgaaaagcttttacccagagatataggttgtcttcttaactctttgaaagtacagtaatgagatccaagcagattcagtaatccatattctgaaagttatttgggttaagaatagaagagttttttgtgtgtgtggggaaggggagagggggaagagtcatgaattatttaccatgattctagtgatggcagaaagcctcaagattttgctgaagtcactgattgattttctgacacaacaagtgaaaggcaacgccagtggctcattggtattgcatgtcagacacacgatcccctgttaaatgcagggctgcattacagctgctataagtttgtgtttcacgggtgggagaaagggataatttctgttacctgatcattaatatactctaaagagttctggaagaaagcaacaaacatgaaccccatgttcaacgaacataatatgggcccttcccgtgggcaaagtcctgtcctggagaatttgaggggtaacatttgatgaaggcatggtccctcactgttaataaatgcacagtctagtggaagtggcagtgtgattaccaaatactgagagttcgatgtagaatgcaatgaatgagatcacagaggtataaggcaagtgttatgggagcacaggaagggggagaaatgagttccatctgaaagggctgaggagggaggctcggaggaggagatgatgactagattgagtctggaaagagtgcagggtttagacaggcaaaaatgggaaaggaatttgagctagctcacatgacataagcaaagtcaaggaagagggaaagtacaggggatgtcacggaatggcacatgttggatgcagctgcgggacatatcagcatgggaagagagggcccaggcagaacagaaggccaggaagggaggccagccctgggtcgcggcggcattttctgagctgccaggtctttctatgtgttatctaacttaatgctcacaaaatccttttgggaaaggcatcatgattgctctaattttatacataaaatagcagatttatggagggtcagtaatacccaagaacacccagccagcaagtggcagagccaggacctagattcaggactgaaaatagcaaaggccatgctgtgaccccatgctgttccgacacagtagaagtcctataactaagtctatggctagggtttggagacttctttcccatgggcaggtgggcatcacagaaggactctgagcagcagagaaacctaagtgaccatgcttcaggtagagcctgaggaatcagtgaaaagaatgagtaggcagagattgaaagcccatcggccaactgggagatagggcacatgtctttgtgaaggggctgtggaagccaaggaaagagaaagcagatggagacagggtgaaagaggacactcagaactttggagcctagacattggggtgaggctagggcacagatgcagatgtccaggtgtttagcctgggtgactgggatgattgcaaatcatcaggcagttttcagttgaacaaaaagaattggaattctgcattagcattctacatcctacacctaaaggcgtgactggttattagacagtaagagaaatgctgaccagagttttaatactacatcaatcagaggcatttctgctgggtaacaaatttaataaaatgacaacatcccttgatatctctctcattcttggcagaaatatctcaaagaagatagacagatggaaaggtggtcagacacataaagaaagcaagcgagaaagcctggaacgttgagccctcatacaagcattgaaatgaatgtggggcttggtcagtatgaaaggcaagtcaatcatcatcactggaagtcagaatcaatttgtaagatggctcgtcaggaccctaaacgcataaacagaagaatgagaggttgttataaagtccttggcttggccgggcgtagtggctcatgcctataatcccagcactttgggaggtccaggtggatggatcatgaggtcaggagttcaataccagcctggccaacatggtgaaaccctgtctctactaaaaatacaaaaattaggtaggcttggtggtgggtgcctgtagtaccagctactcagggggctaaggcagataattgattgaatccgggaggcggagattgcagtgagctgagattgagccactgcactccagcctgggtgacagggtgagactctgtctcaaaaaaaaaaaaaaaaaaaaaagtccttggcttttacccaagtgatgatgctgtgtgttaaggtcaagttgatctgataaatcgctatgcaataatccaagcaccccaatcccttgggggtgctcatgagatgagagatgcaggggcatgacaatattctcaccttgaaaacctcttggggagacttctcaacataggtttgtgacaattgtcccctggtctgagttgaaaaaaatgtagctgatcattatcagcattgccagattaacactggtacccagtgaaatagtcatccccccttgcaagggttatgtggaaggaaggatctatgtttaacagattattttagttttaaaatttgcttatcttatatattgtgctgccatggatgcccttgattttattctttgttaggaaggaatatcatggctttgaaatcctgaggcctatactgtaaatctttcacaaatttaaaaaagtacatgaaataagatacatgaggccgggcgtggtggctcacgcctgtcatcctagcactttgggaggccaaggcaggtggatcacaaggtcaagagatcgagaccatcctggccaacatggggaaaccctgtctctattaaaaatacaaaaattagctgggcatagtggtgtgcctgtagtcccagctactggggaggctgaggcaggagaatcgcttgaacccagcagatggaggttgcagtgagctgagatcatgccactgcactctagcctggtgacagagtgagattctgtctcaaaaaaataaaatacaataaaaggatacatgaaatgtatgtgtgaaatgacagtagagtgtattttgagatatatcataatgtttagtatatgccagacactgttgtaatatatcaattcattataaatgaacacaaaaagggctttcactttcgcatcaatgctatgaggtaggtattgttcctattacactaattttacagatgaagaaactgaggcacacagttgttgattaacttgcctaagatcacacagctggaggagctgggattgaacctagacaatttggttcctgaggcatggtcttaactagtcgaagctgtttcccttggtactcaaacttaataaggtggatttgcaagtatagtctttgaaaagtgatgaccatggagagaagggacttttgtgagggatccctgatctggtgaccagtgagaaccaagacaactacactcattcaagaccacattttacgtttgagccctgttactggagaacagataagggacccatcccgtgtttttgacttcttgacctactgacttactacataactatatcgattttgcatggaagctcctgctctctgtgggtttgaccaggcaccattggcctgccttttgctgcaataagtctgggggcttcactcactccttagtggcttattctcaccacatatttggctcacaccagcagagcctgactcttccggggaaaaaatgatttaccaaattagcatggagataaaaatactttcttcttcgattgagtggtctccttatagaattgaaacaaaattagattcaggaagtggcatgcattttggtaactgatgcttgataattgagtattattagatttaggtttttgcccaaaataacgattgtaggacattagaacgaactatttcagatgaaacttttccaatgtgaatcaaattgtgaaaggaacaagcacatcctgaattagtgctgtatttttgaaacatactggagtaggtttaagcattccttccttcctcacggtaattgagcagatgttcttgccaggctctgcgttaggtacttggacttgggcagtgaatcagacagcaaaagcctcttcctttcaggagctgaccttccaggtgcagatagaaacactgaaatgaattctaattgcatgtgtggtgtgtggacatagcaaaataaccatcatcaaggaaaaaagtactcttcatatttagaaacttggctccatactattttaccaattttgggaatcccaattatttttttcccaaagatacattttagcacgtaggcacactttgaggctttactcccactctcttttgtttctttcactattttcttattccacaaccaaggtctttcccaaaaccccagccttttctcctcctgatggcaaattatggccattattagagacggtgattgtcccatttctgcacaatgaggtgaagcaagaatgaaaatgcttgtggattttggtactacctactgggggcagcttccaactggaaacacaccatgaaatttaccagtttcagaccaaattggatagtcacttaaaaaatcccatgtaagcatttgtacctttgtttcatatttaagctgtatattttacatacctgggaacacctggaaagatcttttggtatgactgtctggagaaggtcttaaacttttagattgttaaggaacttttcagttccttacataaaacctagagttaaaaacttgcgttctgaggccatccctatttctcttgtgatgtgatatgttgagaagttatatatacacatccacatgggcaagccacatactcactaagaaagtccttttgtgtaaataccaggagctaaataaacattttttcatgttttttctagttttattgtggtaacatatatatataacataaaatttaccattttaacaattgtatttttgttttttgatttgtttttgagactgagtctcactctatcacccaggctagagtgcagtggcgtgatcttggctcactgcaacttgtgccttccgggttcaagcgattgtcttgcctcagcctcctgagtagctgggattataggagcctgccaccatgcccagctaattttggtatttttagtagagtcggggtttcaccatgttggccaggctggtcttaaacaactgacctcaagtgatttgcctgcctgggcctctcaaagtgttgggattacaggcatgagccactgaacccaaccattttaaagtgcatagttatgtggcactaaatatattcacactgttgtgcagccatcaccaccttccatctccagaacatttttgtcttcccaaatgaaaactctttacacattgaaccagtcaacaccacctccctgtttccccctcccccacagcctctggtaatcatcattcttctttctgtctctatcatgtgactactctaggaaactcatctaagtgaaattgtacagtattttttgtgtctgacttatttcactcattataatgtcctcaagcttcatccatattgtagcataagtccctcctttctaaggctaaacaatattccactgtatgtacaaaccacattttgtttgtccatttgtgtgtcaatgggcttgggttgcttccaccttttggctattgcgacccatgctgctatgaacaagagtgcacaaatataaacattcttattcactctattgacataatcattttttttttcttttgagacagtgtctctctctgttgctcaggctggagggcagtggcaccatctgggctcactgcaccctctgcctccgggttcaagccattctcctacctcagcctccctagtggctggaattacaggtgtgcaccaccatacctggcgaatttttttgtatttttagtggagatggagtttcactatattggccaggctggtctcgaactcctaaccccaagtgatccacctgcctcggcctcctgaagtgctgggattacaggcgtgagccaccataccaggcctacataattgatttttaaaaattgtgacagactcaactatgatcaatcccttttgaaaatctgtggcaggataggataatattaattaattgatcttgaatacttccaaccctcctgatagattcatctatgtctttaatagacacttgatggccgcccagcatgtactgagcagcctgctggatctggaggattctgcttcaagtgtctctaacagaggagacaggactgtaagtggggggctcgaggctggtgctctgtgtgccacaagcaaggtgtgtgccggttctagaggagaagacagcagttgtgctttgcccttccaggattgtcaggaggggtttggtagcggtggagagaccagaactgaagagaaatgcatgcaatgtaccatccctgggctaggaacttgatctctcttattttatgtaattcttttaatagttttatgaggtaggtactttactgtctttatatcaaagacaaggaattaaggtttggtgagattagtttggccaaggtcacatacctagtaagaagcacatcactttatagctcttaactactctgttacattgatgttccaagcaggtattaacagggtaagggagagaaggggtgaagagtcttccagaaagagagaaacagtgatctacatcacatgggctgatgaaggagcatgggggaatttggagaactgcaagatgtccttacaagtagggtcaccacaattgcctgctggagtcccccctggtggtgaggcctggggaagccccctgttccctcatctcttcctcattgtccttctggtaggatagcaccagtgacacctggagaggctggatattttctgctcaatttgggtttctgctgcttgggaatttctgacataaacagatggaaaacatcagaatcatttttactgaataagtatctaccattgattgagcgcttatactaagccagacactattctaagtacttcaccttcattatcattctaaatcttcacaacaatccttagaggtaggttctatgattaccctattttatagagggagaaaatagatagcaattggcatggccttgattagaataatatgtaagcccaaaaaactacagatggtcattaccaatgtcctatttatgtattagaccctaacagccaactttctcaccttagcatgatacagttatgtcttgattacctctgttatggtatggcttatccttggccgttaggacgggtggctgtatagctcagtgtgccccaaaagaaaaataatgactatcaagcacccaggggctgctgattccctttcatcttgtgcaacagtaaagatgaaatatctatatttaaattgggctccttaagaggtgggctgtcactgtcagttagctttgtggttttcatttctttccagttcagaattggatttgtgaagaaactgaatagtgatgagaccggccctgttcaccctgatgacagttatgcacgtttttaagttgtgacgtcatgaaaacttgtggcacctttctgaacagccagaacttcatttcaaacaaaactctaattatagttgttacttaaaaaaagtccaaactctaaaaaccataacctagttgttgacctagtttataaagtctaggcattccacgggaattcaaggtgcacaaaggccaacctgaacttgtggctgaccccataccttctgctcttcttatatttcccatttcagtgaacagcaattctgtcaaccatcattcaaatgcaaaagctcaagtctttctttcccaacactgcaactctgttgattttaccacctccccatcctctggttatgtccctcacctcctccccactgctggtctctggagtttacttagtagatctcttcgatttggccttgactcccaccttgccatcttccacgctgctgctgagccatgtctctcgcgttaaaatctgaacacatttccctgcttgaaagccttctatagtccccagtgccaggaggtcctggccactgggcccactgtccacatctcctgtcttccccctcttgaatctaatgctgttgttgtattgacatttttgtgttttcatacgtgacagggcagttcacaagttggggcctttactcactcagtgacccaccccccgccatggtggttttgcctcttcccctatgatggctaacttctcttcacaacagcttacccatcaatccaacttgggatcctgtccctttgctaggcccaacttagctcctctcctcatttccttcaattcatttcaactaaatttcagttcatctttgatgaccacttgctaagtgctaggctctgtgctctgtgttgggaatatggagatgaatggaacacagtctctttccttaaggtacaacaggttaatactcaatagctacaaggtgtagaggtggcacagggtggctggtgactaattgtcttggaaggcacacaattcctggagctagtgatatcagggtagagtttgttaaaggacagtaggaaattgacctgtggctgtggtgtgttggtgatgagaagaggagagacattcgagttggaataagcaacatgtgcacagtcatggtggtacaaacgaagaaggtgtttgggagactcctatgcggtttagtatcactgaaaaagtctccttgggcatgagaccaaagaggaacgtgggagccatttgaaggagtatcatgtttattatgctgaagagttcaattttatctctttcctgaaatttccatttcttccctgtctcaatcagcttgggctgctataacaaattacaatagactgggtggcttaaactacaaacatttatttcttatagttctggaggctgggaagtctaagattaagattcagctctggagggagcctgcttcctggtttgcatatggccatgctgtcattgtatcctcacattgtatgtgtgagagagaggaggcaagctctcatgtctcttgttataagggcactaattctattcatgaagatttcatcatcatgacctaattacttcccaaaggccccacctcctaataccatcacatggggtgttagggcttcaacatatgacttttgggaggatacaaacattgagtccttaacatccccaatctgtgtttcccagtgagttctatgcaggtgcaatgaagtccataaactcttcccaaactatgttatcctttagaacagttgtatgaatttccatagcactggtagtttgggttacgtatctgaaaacataattatacaggtctttcattactcttgaattggatcatgtgagtttattttcacttcctcaatgttatgggttgaattgtgtccctcctaaaagatatgttgaagtcctaatctctggtacttgtgaatgtgaccatttttgaaatagggtctttgcaattataatcaagttaagatgggtcattatggagggttctaatccaagatgactggtgttctcataagaagaggaaagccatgggaagacacagacacaatgggagaaagccttgtgatatcaaaggcagagactgaagtgatgcagttacaagccaaggagtgtcaaggattgctggcaaccatcaaaaactgggaagaggtaaggaaggattctccccttcctgtttcagaggaagcccggctcttcctgatcttagacttctggcttctaaagttttgaggcaataaatttctgtttgcttaagtcacccagtttgtggtactttgttatggcagccctagggaccaaatacagctaattatattgtaagatccttagaggtagaaaaatgatgaaatattttagcatgattacagcatggctcagaaagaggttcgagaaataattggtacgtaaatgttgaatgggtgcatgaaatggagatgggagttcacaatagtcagaagggtgtagagtcacctgtttttcccaaaggctagtactatagagtgctttccttgtgcatctcgttgggccatggaaaagctgtgcttctctgtcacttaacttattcttatcacagtcattcaaagcaaaaataagggcagaacatatacacaattgttaacagaagttatctctaaatggtaatattttgggtaattttgattaaccttttgctttaattatattttctaataaaaaaattatgtattcctttaataattaaaagtatgtattttaaaaatacaaatgtgcttaatatgaaaagacaggctgtgcgtggtggctcatacctgtaatcccagcattttgtgaggtcgaggtgggcagactgcttgaccccaaaagtttgagaccagcctgggcaacatagtgggaccccatctctacaaaaaaatacaaaaattagcccaagtggtcgcacatgcctgtcagctactcaggaggctgagacaggaggatcccttgaacccagtagggcagtgagccatgatcatgcccctgcactccaacctgggcaacagagtgagacccagtctcaaaaaaaaaaaaaaaaaaaaaaaagacagcacatatttattattgactaaatctgtcagcattttgatctacaacaaacacaaattgtgtttttctacagcacatatttattattgactaaatctgtcagcattttgatctacaacaaacacaaattgtgtttttctaaagctctttggggtttcttataaagcaggctttttaaccaatgttttgaacatatcaggttaaggtatgtgaaatagtctctccaggtgggatttaacataatgcaataagaactgaagatttaatagaggatttcttttctaagcacaggaagaatggtgaaagcatttagctttcaccattggccagacagataaaacagacattccctaaagacatcagcaccttagagagaaaatcaaaactactcaacagaaaagtgtgaggcaaggaagagctgcagatagtgtctacaaagggtggctcagcagttctggagtggtttctctcactgcatttcctttccccagaggtccctttggctaaagcactgtccaaaggtcagttgctggaatgagtcgtttagtgctgaggaaccagttgcctgcccaaagagttgctccgccagcagtaggaaaaaaaagaaagtgtgaattcaagtatttcagaaagtttgactcccactttataagagcagggggaaaattcataaagaaagtgaggccattaaagagctggagtttacaggattgtgaagcaggaaaagaagtcagtcttgggaagtaccattaacaaatttagtaacaggctgggcttcagcctcctcttcccttgccacactccacgtaacacagaatgcacaagacaccaagccacatgtgtgatttctctggactcgcacgtgtagggcaagctgatgttcatttgtgaattggatttctcatttgcggactcttatctatgatgcaactagtttcccagacattatgctttgtcttggacagatgttggtgagtgccatgcaagtgccctgggtcaaaaacggtttctcttctcctctgcgccttgggtggatgcagggggctactcatttctcctgagccttttcctttgactatagatgacttacctgtatattcagactctgaattcaataaggttcccttgcctcgaatttgccatttactttggacatggatggaagcttgcaagcgcagagcaccatacaatgaatattttagagcacattaatggtactgttagtatagacagagggcctgccacatagtaggctcgtgaaggctgttgtctgaaaagagcttgctttggggacacaaatcaaactgtatatttggttgataagattcagagatgtgaatccatccacagctaatggatggaccagcgagttagctctggcaatgtcttctctagaacagtggttctcaaaatatactgcacgttataattgcctggagagttttaaaaaattgtaatgcacaggctatttatcataccaaattaaatcagaatccttgaggggtaggacccagtctttggtgtttaaaaaaagttctccaagtaacttcaataagcggccagaattagtcatcactatggagtgacaacatccataaatagccactagtcttatgtgataatttaaatttaagctaatatcacttacaattagtttcttagttgcaatagccaaatttcaagtgctcagtagccacatgtggctagtggccaccacactggagagtgtagagttatggaacgtttacatcattgtggaaatttctgttgcactacttaagagtctagagctctaggtttatactgagttcttcaagctgaatgaatactgaatggccatactaccaaaaagaatttgaagtaaaatattcttgccatagattctttatcttgatacccatctctataagggccaagttacgaggccaggtgcggtggctcacacctgtaatacaagcactttgggaggccgaggtggatggatcactttaagtcaggagatcgagaccagcctggccaacgtggtgaaaccccgcctctactaaaaatacaaaaagtagctgggcatggtggtgcatgcctgtaaggaggctgaggcaggagaatcgcttgtaaccagaggtggaggttgcagtgagccaagatcgcgccactgcactccagcctgggcgacagagtgcgactccatcttaaaaaaaaaaaaaaggccaagttacaactagaaggctgatttagattttttggccaaagttatatgtttcttgagataaagatctgatgcacaactcaaaacagtagtgttttttgttaagcccacagctgtggtcagtgtccatggttatcccataatgactacttccacctcattgccaagctcattaaaaaagaacagtctccacacaatgcagtgttaagtttcggggctcagaaaatccctgagagtattgcaagcttatttctacagattttttttgggggggggggtagatttcactttgtgtacaaatccactttagagctcccccttctctcttaaattctcgaacctgtagaaagcatctaggcatgtcctctttatctcaactctgtacatcagcctgaagcaacttgtcaccagaaaaatggaagatgagaagcagattacctttcaaattcagtaatgcaaattattagatgcagtccttccctggaaaatcatatacacgttagggttctcaacaggctgtctgacttaatcacagtgtatttatttagggatttggttataaaacacttctatagcaacactgtagaatggaccactgtaaggaaaaacacaaaagctggggccagcagtttatcacctggaaatagcatggctttgataatttgactcattatgaactcacagaaatagatctattctcagaaatacatttttaggggcggtgggtgagggacaacagagaaagagtacatccagggaggacgctgatctctctgctctttatctaagagagattctcatatgtttgactttttatagattttgccattgagtttcatgattgccaagatgcccagatcaataccttgagggaataccttttggctgaacaacatgacactggagactggcactggttttgaataaaataccagtgaggaaaatttttaaaatactcaatatataattcatctgagaataacaagtgacatgaacaaaaattggctttttaagagatgaggctaagaaccagcttacagcctctcaaaagaccttagttgaatattctttacccaagtcacttctgctgtcactgtctatcctttttaacacacacatacaactccttatgttacagtgagctcttcagagctcctgaagctgccatccaggtattccttgaactgttgtcatcccggaaaattctgaaactttcctagtatttaagtattcatatatccccttttaagtattagtccctatagtagatgcaaaagaataagatacaactctttattttgtaaggacaaatgaatgacatatgtttcaagaataaattctttctctctctccatatatatacatatctcatgaaaatatatctcataaagatatatatttaaaaataaatatatatatttgaatttaaattaatgtcatttaatattaatttcttagctgcaaaaaccaaatttcaaaaaatacatacatatacatatatattatatatacatatatacatgtatatatattatatatacatattatatatgtatattatacgtgtgtgtgtatgtatatatatatatatatatataaataaataaataaaattttacaactaacattagccattgaatagtatgaacctagactctggttcttttatctgatgacatgactagaggagggatggccaaataaggtttatctggggtcccaactctgattgattagaactggctgaaggaaggactctgagaccacaactgagcacagcaagaatgagtgctgtgatcaattattgatgtctgcaacaggcaagaggggacatgtgctcaatgggcacatgtggctagtggccgccatattaggcagtgtaaaattatggactatttacataatcgtggaaatttctgttgcaccacttagagtccagagttctagatttcatattgagttcttcaattggaatgaatactgaatggctacactgccacacacacacactctctctctctctctcacacacacacacacacacacacactccacccaattcctttcagagataaaattttgagatttgagaaaagacaaggaagaaaactgcaagtgaaccatatatagaagtagtttctcaattgtaaggtcacccatttcttcctagactttttttgaagaagatgacagttcctcatcctaaccttccaaactttcttggttgaatctgccaggcaactcacatccaatatcctaagagatcacaagcagtcacaatggtagcagacagagctggctagaattggcaagagaggccccatcactgccacccacttctcatttgggccggaatcagatgggttttgttgtctagtagaaggattatctaatttacctctgagtttctctatgtgattcttggagcccagcattctgatgaacgcataaaaggaattttgacttgggttgtgctaatcctccttacacatctgtgctgcctagaggtgattcacttctttagaatccctccaataatattattatttttctaagcgtctggaaggtagtgtctttgtttgctagggttgtctgcatttgaaaacaagttaatcaacatgcattatatatatatacacatttatatatatatatacatgtgtatatatatgtgtatatataatatatacatgtatataatatatacacgtgtatatattatatataaagcatatataaatgtatacaatatattatatataatgtatatattatattatatatgtatataatgtatatgtattatgcacatgtatatgtattacattatatatacacgtatatgtattatattttatatgtatataacgtgatatatgcgcctaaatagactgtggttcttttatctgatgagatgactagaggagggatggccaaataaggtttatctggggtcccaactctgattgattggaattggctgaaggaaggacactgagaccacaactgagcacagcaagaatgagtgctgtgatcaattattgatgtctgcaacaggcaagaggggaagatgtggctggctatctgcataccagatagtccccatcttaataaagaatgaagcttgtggaggggacagtgggagatagggctgcgtagagtggttggatttgtgttcaaagcgccctgagaagtctgtactgaattccttaggcagtggggagtggaagagtcttgagcattatagcaatatgacaacatctgaacttttaggaagcaaacttggccatatgtaagatggactgaagtgggggaggataaccaataaactaggagcttaaataagaaaaggtaaggacagtgcagatgtgggaacattagaactgccttggagcaaatgataaccatgagattcccattttggatgattgagagggtgttttaatttataatgaaggtaattaatttatagagagttgtattctttttatctgttttcatgtagagtgcttattacagtatagatgttataaacatgtttattgagtaatatatgataataaattaatgaatgaatgaaagagtaagtgaaagttaggaggaggagctggttttgaggaaaagaggacaagttatattttatacattctaagtttcaggtgttggcagggccctctgtagagatgtccccagttcagacatagctttccagtcctcttcaaacctaccattataccactgctgggttgtgggttctcccctctaaacgactacttcctgcatatcactttccatatagctgatttatgattttcttttagaaaaccatgccggtgatctttacctatgtaaaacagttacaatttattgaggagtccattatgtgatatcatttgtgatacaatgtatcattgaatctttatggctccctaatattggggacaatattataccccttctactgaggttactaactcaagtagtagagttgagattcaaatccaagttgccttccttctaaattttacccctgtttgtttccccacactgtctctcactactaagtgatacattctagaaaatgctcatgccatgcttctgatctcatgttaaccaacggtgcctagtggaacctcattacccccggcatttcccatactcctctcccatttacccatttctctcatccatgattttctgaccaattagccagtctgtcctacattatacccatctctcttcttattgcatgtgcatcctcttttatgcattcacttctactcctatttctcactttagtacgtacatgtacgtgtgcataatgatcacatgcttttgaagtggtattaagagagtttgcacaaaaattgtgggacagatatgggtataatgtggtgtgtgttcacccaaagctgttggctttaatcaggattgcaaagctatacacacaggacataacagtttatcttggaaaattagtggttgggaacatctcgatggtggacttgtttcaaactaaacacctcttcctcaaccttcagtgcccttctgcagagctgttagtgcatgagtactgtgagatgcgtccttgttacatgctacaagtagcccctcaggtagaagccagtgtttccaaatgtctacataactaggtcaaattacatccagagctaggctgtgttgctctgatgtgtttacacttattttccattgaatctaagtttctaatgttttaggtcactaacaatgaatccaacatctgacattttatgagtggtgggatgttatcaatccttcagcaagttttgatgttttttttatgacttctggcaagctggagtcattaggatttattaccagaaaagggaacaaatactgttgttttactgtgttcgacgtatagtagctgaaagtagagtattttcaagacctatgttccttttgaaataaaaagttcctaggtcttgccttggtctttgggttggctgggcatgcagtacactgcactgaactcactggtgtgatggaccccgttcacgcaccactccagaccttcctggctcagtgcctgggagtttgtcttgcttctgggtctgggtggccttggaaatggggcaaaggatactgtcataaagccacagctgctgctattgccatcacagaccaaagaattcccatgtgtgatgctcactgacaagaggagtcagctgtacctatgtgctacttggccagaacttagagatgcttggatttcccagtggctacctgggggttccaggtaacaacttgcaagtgcagggggaattaatactgtattgggtgaacttttgatcaatgagaggcagtggatagggagaatccagcagataagttgcttgcctttgttctaagacacagcagattcgtacagcttttctgtgtatgtcctgagagagcaaaggcttagctaagtttctcatgagctgtgactagctctgtgccttttcttttgctttcacttttacttccttgggactgtacaccctgttgccccaccccaaaaagcatataagcttttgagtcaagtttttttttaatttttttttaatcatcttaggctaagacactttttgtcccttctgttagatttgaactcttggaggactgaggccatgtcattttcatgtttctcttgattgcatctagatatttattgaaaccatgtttgctgaatgacaatgtctggcttaccacccaaaggaagttcaacaaaggggagcagaatccctcaattcagggtggctttgacattcatgtcacacccaacctgccacacaaatattggtccagctcgctgtgtcttggcaggtgatggaagcttggccttggaggcaccaaggagctaagaggactccatgatatgaacacaaaggtcgattcacatgctggtgctttagggggcattaaaaccattccagagaagcaggaataaagaatataggagcatctttgtggacactgggtctgcaggtctagcagtaacagaggagggcataatggattcatgaggtcaaagctgggatggaccttgactgtaatgaaaagaggccatgagggtgtgaatcagggaaagaggatgaaggcaggggtgggagttgtgttgaacaattggcagatgatccaggaggcttcataggttgaagactttcagctactcattaggaaacagcaggcatattccttcatttttcccctttttcattttttagacttccccatattcattttccctctctctcccttactgctattattttttcatgtttttgattctgtctttattctacatttgatgattcaaaatgtgacatctttacatttaatgaattcttaacccagtggtatatgttttgaagagtgaaattaataaagaggcttagagagcaaatagaaatacacttctataatgaaaataatctgtcactcatgcgttagctgattctagttgatgtgttctttgggagcctgaagacaaccgagaaatgggtcctacagctgtgagctctccttccactgccatgatttccttcacggagtcatagcattgctgattcctaactgggatgtggttggacttaaaccttggtttaaatcctgactctgatatccaaacatcctaagagtcaagtgcctggtttcttagtttctgattttttacacagataataccttcacaaacacatacggtatatggaagttgaagaaagaaatgaaataatgtttaaatatgactttgaacatattcaacaaaactctcgggttcaggaattttagtattgtggtaagaatatgattgctgtgaatgacaataatagttgagctagcccttcagtgaacaagttgagacactttttttttttgtaacctggttaacatagggtttctcaacctcagaactcttgacattttgggctggatgaatcattgctgtggagagctatgctgtgtattgtaggatgttttggctcatccctaacccctacctattagatgccattagcctcccctactcctgatgtcacatccaaaaatgtctcctgacattgccaaatgtcccttcctgggtaaaatctttcccaggtgagaaccactgggatacagcatgtccactagagctatagttttcctccttatattaacgtgttgactaaaacttaaaaagcaaacataatagatacctccaaacagcaaatgggctaatgcagttggtatacacaacagtacatctgccaatgtttatacatagcacacggctgtactcagctgcagccagtgacaaacagaattcggagtttactttcagtccacactaagaggtgactaacatggcgggataaaaagccaggagaccccccttcccagaagcccccctttgaatcacaacacatatgtgagtaatgactgtgaattgaatttatgactcaagtgctgtttgtctgcatacatcaaataaaatttgagacttaaagacacaagctgccatgttcgtttcccccctcatattcatttgtgataactacttagaattcagcccccctcttttttaaaaaaaaatagcactctgtcatttccagaaaatgttttaaattagtacaaaacttggctaaatttagcttttatagaagaaagaataaaacataattaactgtttaaagaagaaaacagaaaccacatgaaggaatgagacttgctggcgagaaatctaacagtagtgcttggtagctaacccatctcctgtgtaacagatgttcacgaatttaaatggaaacaggatgggcgtccccatagaaggcatttgtgataaaaagctgctaactgtgtaaatgtacgaggctgctacaggtgtggcatctcatctaattgcccagggatgggactgcaagaacactcgaatgcacaaagcaaaagaaagtctcagcatggcaagaaatatcgacagatagaacgcttagcaggatcctggccgggagaccccatgggtgcagtctgcttgctgtaattgccggctggagtggaaaagaaaagactctgttttaaagctctcgaagcattcgtctctggttttagcagaacatataacatcttctgtaatttctatgtaaatacttgacagttgaaaagaattctttttttttcttcctatccagactataatttatggtggtttagtgggaaaaggggttaatttgatttaaaaactgaaaatgattctctatttggctttttaaaaagtatttatttaaaaaactctgcacagaacagacagaggggagacaaaggattctattgtatgactgacctaggcgtgccatgtctctttgctccctacacagacagaggcctggcctgaagcacgcaagattatgcacacatgggtccaatctttgtcacctgtcacctaataaagcctcactgaatcaaagactaggttatcatttattctgctggactgacttatgcaacattctctgtttaatgtcatcttttcttaatactcaattattattattattgttattgttactgtaatatttaaaaacacagatggacctgggaacatgccattgtaacattgtggccatcagccaaaaaaaaaaaaaaaaaaggtacaataatctattgttgagctggaactcctccagtgactcataggctctggggataatgtctctgaaatcatgcctataagttaatcgatgaagttttcttttattcctcagtatatacattttatctcctttgtaagatacaacttaataataaattaaataactatcaagcatattgcaagattaccttattaacagtcactttttatgtgaagtcgctctaaatattcaaggaatagtttctttccattggaaaaaatttctgagaaattggatcagaaagttttttgaggctcaatgtggggttctgggctcatcttttatacctgcttctatgaggtggtgcagtttcccatgaaaaaaaaaaaaaccagaaagaaaagatacaataccctgttgcctgggtgcaggaagaaagagaacatccccgctgacccagtgatcctagttttctcctgcctttccggagattttcaacagaaaatgccaggcaaggttgagctttctttttctaaaattgttttctctttgactcatggatttaatggtaacacaaaaggtccccttctctagaagaaattggaagttaaatttatcatctcttcttttacatattttccccaacatgccaaatcttagttcattgagggcttcgataatgcaggcagtcctgcatttcagatatgcatagtgccgtgccatttagtgacatgtatgggttctgcagtttacattttgattaataggagcaattaataaatcatgagttacataatatccacacagtgaaaagcctcaaagttaccatgaagtgattgagatattaaatgcctatatgtattgaatatgatttttttgaagtagtctcatgccagttatcttcccaggagaagtaaaattgttctgcttatcttctttcactgagtcatccccatcaaaacaacaagtaagtgactcctcctcagaacttaatatttaactaaactctttcagttactaattaagggataaattaggttcctattagaatgaaaaatcggaatggctttattctctcttaaccttagatacattctctcagtctaatatcttgctcagggtctaatgcagacaagttttattttatagttctctcattttctttctgctctgcaatcctcctcctcctcctcttacacctcctccttctcctccttcttcttcctcctccctctcttccttctcctcctcttcctccttcttttattcttggaaattaatgctttgctatatgtggagatcttcctgacctgccaaatgacacatcgtctgaaaatgatgaacacacattgtttaaaaatgaggctggaaacttggcccttcattaaaacctctgtaacagataacattctgtttcttctcagtattttgttgtgcttgatataatcatttattacaatccctattatgtttttgcttgcacatagagtagcagaaggaataaccttctgatagtaacttttcatcagataggctcctgagaataatctgatggtaaaatgtgatcttggttttgttacctatgtgtcaaagtgttgagatcaagggactttattcttccactggcaaaactcatagttacaacatttttctagattcggctcaaacagcggcaaatttcttattttaaatgttcccttcacaaaacttttatagatgaaatgtataaataaatcagatgactagttcatgaacatactctgccagtatctgatactttgtaaaaacaagtaaatggttgctgtatctaatagatgccttctacattagagaatcgtaatggatcaaatgttagattttccacaaaaaattatcctctggaacaaaacagttcaagaaatagaatgtgatactttgctaggctcaacagatacacttttttattctaacagctgcctctgcagacaacagcatcagatgaacaaatattattttcatagcagaaatggtcatgtctgctgggctgccaattgacgatgcagtcattttgcctctgtgtagctttatctactactaaaatagactttgattcttccattggagaagaatataatgatcatgtgtgatatgtaggaaagttacacgttcatagcagaaaacacgtaagagagagtttgcccaggcaaatccgggtccacctgccatatcagaatgagagaagaaagaggggccctctagtctcagtcttgagcaccttaaatacacactagcacttaggccccagggaggtttggaacataagcaccaaaaatccccccactgcaacaggggctaactagagaggacctaaaaaaacctttccatccagggagttgaaacatatctgtgaaaacaatagcttgtagaagctgttgttttagggaagatgtgttagggaagatcccaaccagcgtctataagagtggtttggaaagttctggaacatttcaaatgctgtgatctttgtatcactttgtttccaggtttttttatttttattttttcttcctcccagacaagacctttcaggttagcccaacgattgcgcaacatgtaaccaagcatgcctctccccttcctattttcttttgtttttaatttaaagggaaatcaacagccgccacccatttcatgattgcaatgatgaggctggagcatttcagcctcataacttttctggattcttttccgtgtccaaacagatttttgtaaaaaaatcatgttagttttttctggtacacagtaaattccgatggtttttttgctgtgcatgcctcatgggtggtatgagttgagaaaaaaatgccagaaagtggctactgagaatcttgtggaatggaagctgtcaatgggatggggaaacattaatgctttatgaggaaaattaatgatggcagtttccacatgagccccagcctagacttcttggaccctaagtaaagagttccatgtgatctcccaagtggtacacagccattcgttctttaatgtcccagttaaaagtgttttatgttaatcatcaaaatctagaatttctcaagcgaagttctaaacacacagaaaataataaatggcacccagcaggaataattttcctcatggtttttaacatcagttctctgatagcgcaatgctcatgttcttacatgtatgagtgcaggtgaatacacatatatacatatacattctctaacccagagatgaattaaaaaggagaattttcatcctatgtgctttatgccctaagtcagagttgagggaagaaacaagatcagctacattgagttttattctaggagcaaaaggcttgtaaactcttcagaagtctctcccctaaccagttccacttagccttgaactgtgctgctccccacatgaggtaagaagacgcttcatctagaactttcagaagtggtgcaggaatttagacacacttagggaatagcaggcatctcctccattgatctcagaaacctttggtttgtgtttttggctttttcaaaaatatatttgctcccttcaagttggactgaaataaactcaggtctaggttgccttctcaatggcagcaatgagccagtactattaaaatatcagcacagagaactagaaatgtcggatcttgtcactgccatagaagaattgtggctaccacttctatgcagagtatggaatggtctttcctcaggttcctgtatgctaaaggtccggacagaattactctgtccctttctctagcctcagtcatctgaccagtgtgtgaacaacaagaatatcctctgataagccttcgtccacgattgtgacaaccctgtgttccctctaatgtccaggagtccctctggctccctttagcctctgtgcctccagggtgcctgtggtaggagcagagggagctagtgactccctgctgatgctaaccgtattctaaaccactagtatagtctccctcctttcctcctggaatttctctcttcctgcagcaactcctggaactcctcctgaatacaatccacctgctgttttgtaagaatagctctctgttctttcatgtgggttcggatttttgcccaattcaacacatcctgagcagggcatctaacttcactacacagagagcctggctgtgagacacaaagacctacacaaacatgggaccaaagaaacatactttgctttgtgggtcttaacataatctaccaatcggtctttcaaaattcttgtcttctcatgtatgacatgttaagactcttactaaagaactcacttaaatgtcagcccatatactctacaaaaaaatgttttatctctattcacctccattctttttgaaggtgattttactaaagccagataactgaaatattaatgtatagaatctaatttcttaatggtatggaaggctgaaaatagttttattgtttgatgttgagctatagatgatgatttctttttcttttatttttttccttttttttttttttgaaggttggaagattctttaatgagagacatatgcagcaagttaaagcttgtaagcttacttcatctcagtaatgcagaaaactccttaaactgttgattttcttttggagggcactctgaactatgcaaaatatcatctgattcctcaaggaaaactaggaaacaatgaagaaaaagtaccttcaaactttatgaatgtctcggccaccccctgctgcatccatcaaataccagattgaattagtgagattcaaataccagagattttatggtaatgggatatttagaaatcattccccgaggttccgcctatgttggagtgagcctgtgtgctcacagtgatagaatttggggctagatcccagtgttggttcaattattaggctaggtgatcttccacagcttattttaaattgcagttttccaagatttataagactgcatttttggactttctctaatgcactcaagcaaaaaaaaaaaaatcatttgcctgtacactgatgactatacctggtaaggctatataaatgtgtacaaatttgtaccaatactttaactttattggttcacttgcaggtttcatagtcacttgaccgtcattcaccatttacctccagatgcctttcttccctctgctctgagctcaggtacaagtgtccattattgctctaagagctagtcttgactgggcttaattgatatttccattagtctgatgaatacaaatggcattaaataccaggatcagacacaaagtgaatatgagtgatcctttgcagccacctgggaagggtgagtggggatttttaaggcatagtggtgaggacaattagcagggctaatgtaccctttccatggttgagatgacaccagatgcccctctcttgctggcattcagtgcacaatgaagtctgcattgatctagatggcaaaccacattggtttcagagccaggaggctccactcagcatggcacaactttgtgttatgagaggaaaagagtgaggcagcaagtgagcttagagccttgggtcaggttgaaggaaagtttccctctttctccccggaccagatgcacatatcaactgtgaaccctgaagtcaagtcaagctcctaggactgcctccctgtgttgggctgagggcagcgagtacgccttggcagcttttaacccgtgtcccttctgcctgcattggcacgcggtcaatctctgagcagttgggggatatggaaagcataaaggggaaggatccacagggacaatcaatcatgtcatcaagatcagcttctgaaggaaacaagcacaaatgcttcagtgaaaacaaactaatttcattctgactgttctactgttcggggttttatgactgtgtttttcaccctgtgtggaaaaatacaaagaactgcccaggaactgaaaaacagaaaagaatctgtcttgaggaacatttccccctttaacttctttgctgtctttaccagatgtacccatccaggctccaacatgaaccacacaatggaccttaggcccattccagcacacaataactcaacaaaggatgcttaaaacattaaaaggatctttactatcctcttggcaaagtacttcacatgaattgccagttttccagttgttacaccaaagaaagataaggggatcaacggatcaaaatccatcttacttcatacaaaagacagaagttgttatagaaagccaatatggcttggggagggaacatggagtcagtcccggtgtggggtcaatgattttaccaggtgatattccttcagttgtttatgttgatgttttttcaccccctaaagagactcagagataaataaaattcagtctttggggttgctctaaagcactcaagtaaaaattacctgattattggcaactggattttgcaaaattgtggggagaaaatttggaaccctcgcaaatcctcctacacaaatgttgagctaaatattttcactttatgctcgcctgacagagatagtagtggtgaaagttacagagagatttgccgatatagagcatttgcttatatcacaccctttctcttttccccaaatcttttcctttttaatagcgtaggaagaaaaaaaaggagtttaaggaaataatttcttgtgcttactatagccctcaagacttttttttactttttaaagatgaggtcttgctctgtcacccaggctggagtgcagtggtgtgatcacagctcactgtaggctcaaactcctgggctcaagtgatcctcctgcctcagcctctcaagtacctgggactacaaatgcatgccaccaggccttactaattatttttgtcttttgtaaaggtggggtctcactatgttggccaggcttgtctcgaactcctggactcaagcagtcctccagctggcctcctaatgtgctgggattacaggcatgagccactgtgcctgtccccaacaattttcttattctttgagtttctcactcgtactaaacaaaactagagaattcccctgaattacacaggaatctgggtaaagttgtatagattcagaccatgtgatacttcttcagccattcttctgagaatttggcaaggagactataagttttgattggttaatatttgtgtgggtacgaatgccagcactgaaatatgtggttaaatattgtattgctttgggtggttggcctcatgtgagtgcttcctctagcacaaatgtcatttggcaaacttggttctcacagttcaaatgaaatctatggaggaagaggagagcctgtcgtctcctcttaggacagatggcacatgctgcagtgtgaatggcagaattggggaggcctaggtctgggtttttgtggctagagaatatactaaccatcagaatcatgttgtggccattaataggattatcttattttcagtaattactaactatactatatgagagacagatagtataataactaatgactaactatatgaaagacagtttaatgttaatacctccactctgaatgaattgcttgtttaacagatggcttctgacttattgggaagttgttagaacatcaaagcacagtttatgaggcctggcaaattatgtatctgagtttagccttttgtttccaatgttaccttctaaatgatctgtttcataactaagattaatatgagcacagttaaataagttatttcatggagaacaggcatgccaatatagatattatcaagatgtataatttgccaaaaatatttgttgagtatctgtgatgtgccagccatacagtggtaaacatttattgatcacttacagatatgaactatagtatgcacacatctacagtttcagatggactatagtatcatagttacataaaatacagccaaaggcatcctagaatttttctttttcaaaaataaaacaattctacaatctcacaaacatattcgggtccatttctctgtgcttacaaacatgctcaggcttgcccaatgagtggaacccaccatcctttgaccttggccttgcagcctagtttctttgagagtacattttcccctaccaactcctccgccacataccccacaaaaagcagcctcattttccacctccaaattctcactatcttccactcctcagccccaggaacctgctttttactcccactgctctcctgaaattgctttctcaaatgtcaaagtaccaccagttgattcaattcttccctcccagacttctctgcaacacccttgaaaatgccctccttgaaaagctctctatccttggtatgttctccacactgtggcaactcgagacttttcttcacctctctgacagttcctttcatcttctttgttcttgctccctaaagtaagattctttaaggctttctttgctctctgtgtacaaccttcttgtagaattgggtatttcctgggctttgactattgtatctatgaatgtgaactatcgaagctctttctccagatctggcttctcttcagactccagtcccatgtcttcatttgctacctggaagcctcacctcatgatgagtttgggaactcaacatatcccaaagcaaactcattgactgcttctcaccaaggatcttctcttcctggttttccaggtttggatgcgttctcctgttctcctagagggttctccctcttaattagttgcccaattctgtccattctaccttcactataacaagtgactgtcccacttttagttagtcctgccacctcctctcttcagctcttcatgaattccctctctgaactgctctccctcatgccagtctctttccactctgttccgtgcctcacacgttttgcagatgaaccttgccaaagaaatgatatcactgtgacatttctgtcttcacaaatgccttattctatcctgaccctccaaattaatgtttttaaccttttctcctgctctttctcaagcatgtagccatggtcccacaaataccatgggcttggggggaggttcagatcacatagcacattcccctctctgtccccttgtatatgcccctagagctgtgtggactctcctccttcacacttctgcacttgccatccttcaaggcccagttctgttgacatagtctccaggaagacttcctcttttggtgatgtttgagaagttacaataaggtgctgtacttttccatagctcggcttgattcatgtgctatataaaaaaaaagactgtagagggtctcatagcaatacagcaacaggtggttgatgaatcaatttaggaagtggctgctgggggcagagctttatttatcaaagggtacagctttgcaagctgagtgtacaagagcttcctgggtcagggctgtctggtgacctacagacatggatggggtggcagtcataagtgagtttgggctgtgacattttggctttctctaggttttctcatttatcacaaagggactggtaattcctatgtgactctacatgtaggcatcacatgtcgctgagctccagagaaaaggcaagctcgtccaccttcagactcatgcacttgcatcccactaggtcctcccttgggtctgtaatgagctacttctcctcaccttagttaagcagtttcattctttacagaccacctcaaaggccaattctaccatggtctttcttcaacccatagtcataacactctctccctcttctggtcacacatggcactctatctgtgcctcaagtggttcaatgactgttctccctggctttgcatgtgtcatcttaccaaatggattataagatgtttgagtctggagactaaattttatttattattataatgcacaatatagccctgtgttcatagctggaatttaatacatgttagttgaataaacattgaaggatgaagtttcagatttttttggctaccattactctcagctatgttgatgtaatgaaacacgtgtgccatataaacatgtatctatttaccaatctgctgctcaaattgatgactttttacaaggcttctaggtggggcagcttttagaataaagatgaacacccacacgcacactcttacatgagtgactgaacaatctcacattttattatttatagaaatacatgtgaatatgctacaacttaatttatttcctgcaagcagaaatccttatcattataaggaagcccctgtcttttgtttttgtccattttttcccctgatgtgttcataaacatgtcccatggatggcaggaatgcacagctatttcactggtggtataaatagttttcacagaagccctgtctatcatggtaaatggcacaaaagacttttttcctccacagaagcctttatttttctccctgtatttccctcagaggtccgccacagtctgaagggacttcacagctgtgctgtctacgaacccactcctaacttccaaactttcgccaaagtgtttcctctgaggtccttatagaagcgcttctggacaacgtgggatgttgctaacatttggaaagtgactgtcatgctgcgaggaagtatttgcaggcctctgagttcagtcctccgaggacatttcaccttctttgctctcgtccaagccttagaccccagcacccagtcagctcccctcctgtgggttttccgggctgctgtttcatctctctccccattaccctcatcatccccactcccaccccgacataaattcaaaagaaatctttttttttttttgggggggggtttcacttttgaaatgaaggctcatatttcagctctagatttagaataggtaaatattttttaaaaaatcatttcttcatataaattaaaaagccaaacatcaataagccaaacatcaatagcaacggcaacacctctccaacaacagctgcagaaattgccaacgtgcacctaacctgacctcacggggccatgccgggggccttgtggaagaggatcagtccatctctgccccacctcaagcaagagtgacttgcatttcattcctctgtattcattctctcggggttttcagccacaaaagtactttataaaagttctgtataggaacaggctctgagaggagaatttctcagaagaggtccaaggtgctttgcttaaattactcaaggttcaggctctcagggacagggccatggctcacaggcatttgctctggggctgtgagaatgtgggatgagaatgaggtggtatcatttgtggatgtgatggtctacccttccctaatttcctaatttgggaatgactgattgacaaggatggggctacctggagagctaggacagtacagagcagaccacttacagcccatctccagggtgcctaaacaaggggatgtgcagaatttctttcttttttttcctttttcttttgagatggagtttcactcttgtcacccaggctagagtgcagtggcgcggtctcagctcattgcaacctccgcctcccgggctcaagcaattctcctgcttcagcctcctgagtagctgggattacaggagcccgccactgtgcccagctactttttgtgtgtgtgtgtattttaagtagagacagggtttcaccatcttggccaggctggtcttgaactcctgacctcgtaatctgcccacctcggcctcccaaagtgctgggattacaggcgtgagccactgtgcccggccgggatgtgcagaatttcttgcctggagatgttcatttatttccttccctaccccatccccccaaacagctacactgcctggagatttggaagaaagagatgaacagatgtgtgtgatgttttagttacatttgacctaaaagtgggggaaatgagctaaatgacacaccaaagtccttttcactaaacaaccagtatcagtagagcaagttgtttaaatattgccattagcccacttctgaggcttactggagagttttactaatggcaagattcaaaaacagtaacctctgtcttattgaatagacgctccccagctgctgaactgtgaagttaatttctggaaagtgaattgtgtttgtcatttttaaaaatacaattttctgtaataaaagcagagatgcaaccttcagcagagaaacattccaatgtggctgggttgaatgctttgtttggctgaggaatggttaaagtgatgtttgaggatgtaacctaccagtggaatgaggcaagagaactttgcttactacattggcctcccctaggtgtacttgttaattaagagtaaaaccacgaaggtagctccaaccccaatcgctgtggatgccacacccgcgccagcgagggcaggctgatagaggctgtgctaagattgccgtcctgtcacagcgtggagtgggagtgggaagggggcctcctactctcatcgttagccaacgcacaacatatgttcactagtcatatcctttctgtcaagcaaggaactaggccctgggagtacaaggatgaataatacacgaggcccttcttcaaggaatttatagatccttcaggtaaaccatgtgatgtccctccgaactgactggcataaagcggatgatggggctttgacatcttgtgctgagaataacagaatcacggctgaactgacatcataggatcatagaattttataacatgaagcagccttagagatcgttcaccaaattgagttaaaattaaatgattgttatagttccttataaactgccaaatgctaaacaaacatgattattatttggtggaagcccctcaggttttggaaggagagagactgatacaaagttaagtcattgcaacaggtcttctagctacagtgttataggtatagctacattgttacacagctacattgtttaacattcataacccgcatcttattttgttgtttagtacacataagtaatattttatttttcaaattatattataaataacagaaattatgagaaagaaactgtattgaggaaatatgggaaagtaattttgtactgcagatctagagtataatgaacaaaaagagcctataagcaaaaagattcaagctcttaacaaggaaatgccttgtacataactgcacatataggctgggctcagtggctcatgcctgtaataccagcactttgggaggccgaggcaggtggatcacttgaggtcaggagttcaagaccagcccggccaacacggcaaaaccccatctctactaaatacaaaaattagctgcgcatggtggcgggtgcctgtagtctcagctattcaggaggctgaggtaggagaatcacttgaaaccagaggtggaggttgcagtgatctgagatcttgccactgcactccagcctgggaaacagctagactttgtctcagaaaaaaattgcacacatagttaggtgatgacttagttacatttcagagaggatatgtggtaggcagagtacctgtggatggccccccaagatttcccaccataagacccacaggtgtccatctctgtgctaacttccagcgtggtttaggggaggcactgacactctgcagaatcccagaaaatataattaaagttctgtttataaatcctttattgacatttagtgaacgattgcagtgctactgatgtagtgctctttaatagctcattatgaagtttgttagaagagacattagcagcaatttgtcaatagcctctggaagtcaagtgacaaggtatgcgtgttttacagtgctgccgagtgttagacatatccttgcaggtggggaaacttcatccacttatctgcccaagggatagttcacatggtgactcagatgttttgaagccacaccataatgtgttctaaaagtcggcgagaggtggaatgacagcaatcccaccaaagtggcccctgtcactcaaacttgagaagctgcatggaattccttttgtgtcattctaaaaaactataattcttttgaataggataatttcttttaaaaatattatggaagctctttagtttaattagatcccatttgtcaattttggcttttgttgccattgcttttggtgttttagacatgaatctttgcccatgcctatgtcctgaatgggagaaaatttttgcaatctattcatctgacaaagggctaatatccagaatctgtgaagaacttaaacaaatttacaagaaaaaaacaaacaacaccatcaaaaagtgggcaaaggatatgaacagacacttcccaaaagaaatttatgcagccaacagacatatgaaaaaatgctcatcatcactggtcattagagaaatgcaaatcaaaaccacaatgagataccatctcacaccagttagaatggtgatcattaaaaagtcaggaaacaacagatgctggagaggatgtggagaaataggaaagcttttacactgttggtgggaatgtaaattagttaaaccattgtggaagacagtgtggcgatttctcaaggatctagaactagaaataccatttgacccagcaatcccattactgggcatatacccaaaggattataaatcattctactataaagacacatgcacacgtatgtttcttgcggcattattcacaacagcaaagacttggaaccaacccaaatgtccatcaataatagactggataaagaaaatgtggcacatacacaccatggaatactatgcagtcataaaaaggatgagttcatgtcctttgcagggacatggatgaagctggaaatcaccattctcagcaaactatcacaaggacagaaaaccaaacactacatgttctcactcataagtgtgagttgaacaaggagaacacatggacatagggagaggaacatcatccaccggggcctgtcgggggatgggggtctaggggatgaatagcaacccattaggagaaatacctaatttaggtaatgggttgatgggtgcagcaaaccaccatggcacgtgtatacctatgtaacaaaactgcacattctgcacatgtaccctagaacttaaaatataataataataaaaaagaaaatatatacatggctattaaaattggaaaaaaaatagtatggaattggcctgtcattatacgggggtacctgaggtggcaatttggcaccacttggtactttttattcatacgtgataatgtctggcatggaatggggtcaatatatatgctttgaaggagtgaatttatatttaagtttgcaatagctttatgattctacagctctcttatttaattatttcatttaatcatctcttcaacacctctctagaaggtaaaaaataatgttctcattttacagaaaaagaaattgatatttgggacgtttaatataaccaagatgcataggtctgtgcagctgctctttcttctcactttcaggtcataattactgtttgctgggaacatactgggtactggtgttaggcaggtcttttgtttctcattaactacctcctcacaccaggaggtatgtaggtctttttatcttcagatgaagtctcagtgaggttatgtaatttgagctgaatcacacaggctatgtctgatcaagctggcatctaatcgcaaggcttgctactcaagaggatgtggccttcctgccatcacccagctgcccttccaactgaagtataaggctattgctatttccatttttaaaaatctgacaggcacaaagcacaaaggcacaaagacttaagggatggctacagttatgatagttcagtcaagaagtctctgttttggggactttttttttttttaaatctacgttttacagcattattatgcgtctacgtgaacttaatttaatgcaacaagcgttgacaagtgcctgttttgtgcaaattctgtgtgatacccaatgtccatttcctattcttcctttcaaaaagtggccataaacagaaccctgattttgttgaggataacagtgtgcttaggtaagagatgtcatttcccatcatttcatgtagcttggcacagtcgtgtgaataacttctgcatgcaacccccagggaagctttctaaagggccttttccttccctttccttctgactggaatgtggacatgatgtccagagctcaggcagccatcctgggccacaaaacatcattgtgaatggatgccaagtgttggggatgatggagaagaaagatataaggagtctaggtttttgatgacatagtggagctgcccagtcagccttgggctacttacaactggaattaccataagaaagaaataaacttttattttgtttaaatgactactttcttctgatctctaaatgcaacttctaacttatggagttacaggaaagctggaaaagatatatttattagtctttaggaaagacaaatccacaactcactacagtatggtctgaatgtgacttgatccaatgatctaatgaaaacataaactcagtggggagcattccagagagagaagaaattaattctgctaagaagaaggtatcaagaaaagcttgttgtaccttggatggaggaagataagaagtggaacagaaaactcagtaagcaaaagaaagcctggactccaagaagttgagcttaagtgatggcaagttggttgcaaaaaaatggctttgatatttccaaaatgattttctttaagttttcagcaaagcattgactagtcatagacttttagaccttgttctgtggacccagatctaaaccaaactgcaagtttgtgtcacttgagatattatctaccagcacatttaagtctctttctttaaacatatcacttcagtggtgatatcttaagctacagaaagagtcatcttcctttacacatttggctataattgagtagagatgacttttataagattcagtcctacagtcataggcctgggttaaaaagctgtctttgactgaagtgggaggagaaaggagaaaaggagaggggaaatagttatttgggatcccttctgggatatcccttctgactccttgtggcaggagtgattgtctgattgtttcattgcaggggtcaggctggagcagagcctcaaaggcaggagggtaaagaattagggctccaaccccaggggctaacgatgctagggaacttcaggagcttatgacatatccctgacttctccctctggtgttcaacaaatatccatgtaatcctaacctttccttggcctctcttacagttagggcaggaccaactaattagattgtggttaatgggatgtaagtgggaataagctaacctcttccaggttgagaacttaaaggtgtcctatattataatcccacccaccctctctcccctcactgtagtgacattatatcttgaattacagatgccatagctacaaggtgggagcagcctgggaccctgaatcactgcgtggaagagattctcgcagaggagaagttttcaaagcatctgtctttgtgtgagcaggaaataagcgttggtggtatgaagacattgaaacatgggaatatttgtgatggcagctggcattaattactctgattttgacattacttcttggcaaggaaaataagtgagaggtggtgcacctttgatgagaagcatgggattcggagttggaaaatacagccttcagcttgattcctgggtgagtttgggcaagtttcttaacttcttcagccccagatttttatctataaaaatgagaataatggctgtgcctccttcctagggcagttttttatttttcaaagtatggttgcacagaaaacctgcatcagaaatacccacaggactattacactgcaaatcactgtgtgcccatctggaagctaccgaatccagatctttgtgggtgggaggaagtctattttttttttttaaagttatccaggggactcttacacttactaaagttggaggatgattgttctaagcagttgtgaggattgcatgagacaatacgaacaaagactttaggactatatctggcccatggtaagtgctccatatatggaagcaattatttttatcattagagcacactgtggtgtagaataacttggtcagaaaagctaggcaagtccatgaaggggaaaaagggagatggcattactctttctcaggattataactctgaactcaaagggagccaagagggcaggcacactgaatgtaacccgatttgacttaaacggaagactgaggcaaatcattgatgtgttgagtattcagcaacagaataacaacctgaaaacagatgaaggagaaggttgctgtcctaacagcaaaatcccttaagactcccaggctttccgaaggtgaatttttaagcattgatggaaatgcgttaatgagcatataaaattgtggttgaatggtgaccaccatgcctgaagctctgttgaaaaattattgacagctatattgcttattcctgtagtggttaggaaatgaaatgcctttctctaatcaagtaattgcattaaggagctactgggaacatttggttgcttttccggaataggcaagaagtcaactgcacttcaaccaggttaactgtcaagaggagtttggctcaaatttcttttagttcaactaacatcttttttttcctcatgcatatgcaagcaaaagtataaaaataaattcagctaatagccaaaacaaaacagcacatttgtagtaaatcctgcctgtttctgaaataaaattcagcaaaagatgtgtttttgttttttctgtttaagggagagatggtggagatgtgggttttggcacaaaccttaaaccctaaaatgagctgcaacacaggtggagtgagatggatttccagtgactaaggcagacagcgtcatgcccagctttaactgtgtgaagattcattgtgaattttgccatagcccaagcagaaagaagatacattttctggttacaatagttttggttggcagaatttacctgaaaattcactcaaaaaagtctctcatttgaaagatgaactggtagagaattgtgaacatacagaacaaggatataagtagacagaacacagtcatttttttgttgaagttgttactgtgaaatttcaagctccttgggtcttcgaaaggccacttttatgtctgcagctccatagagatacaaccactgaaataaaaaacacagtgactgggccattttgtttacacagtgccacattcttggccagtcttgtttgtcaccaaatggcctgatgaatgctgttttgatgtcacgccctagataccactttgtgtttttgtgctcttgggcatgaatgggtgactagctcactcatgggctgtggctctaaggcccctggttactgagcaaagttgatctgaattgctagaacatttgagcccatttgccccatcctgctcgttctcctcctcttcctctttttctctcccatatatacagtgatatgcagggcataccactacatcatagatctcagtcctcaaagcttacaaaattacttccatttgtgaggtaaactaactcttgttcctcagtcttgaatttacccaccaggcttgctgcaaagaatgagcttaaaaataacctgatgatttccacgtggcagggccacgggttacagagcacagcctgtgcccctaggacaggcacccacattgttctttttggaaggagtggatctgatgccagggaaaggtgacacaagaaagaagctggccacgaagcctctgagctttgtgacctgatgctcacctgacgcatggccaggctgtctcctctctgccaaatagggagagaaactctgacttggccgacatcgtgggtgtgttaggtaatatttgccaactgctttgaagatgaaaagcgttatggggcactaaatgtgataattatcaattataaaacctcactactccctggaacactaggggcgaatgagcaggaaatataaatgtttgtgacaggaagccaggagccaggatggctcgtgaaatgtgaaaagttcaacacacagtgcccttacctggggcaagccaggaactcatttgtctttggaaggtaaatgcttccttgagctaacgaggtggccccctgagagactaccttattaagtactcctggaattctgggcaaggggtgcctgtgtacctctccagtgccacctgggtgccatgaaaaaaatgtcccacttggagtttggcctgggcttttccctcatcctttctctattatccgaggataacagggtgatagactgaagacctctgggccgttcagatattcgtacattctagacacacatcatgatgatattcacacatcataatcattgagcttttgcaaggatcccggaatgaggcacacacctcctctggccatttgattgtgtttataaactgaagtgttcttgtcttggaaatctttagccttttcagggtcatctggaatcccgaggctgatgtcatgtccggctatcggcacatgtagtgtaggcagtttactctatggcttcatctgaggggtatggggcaggatgtctgtcccagtagccaacccttttgcccgtcaggccaccaatgggaatttctcttgccagtggtttgtttgtacaagtctcccaacaaatgcatccttgtaaaggatggcggtaaaataataactccttctagttcatcttttttgaaagacagacaaatttgggggcactcagaagaattacaattatttacctcctgtgagataaagggctgtctaacaggctgatgtgtggccaggacaaaacagagcagaaacagtgcccattactgagcaagtagacaacacgggactccaagtctagacactgccagcgcccagctgtgtgcttatggcgaaccccttcccctcccctacagaggctcagtgaacattcgtaaaatgaaaccagcccagctaggcaaatgattttaagtccttccttgctctaaagactcaaacaaatttacaagaaaaaaacaaacaaccccatcaaaaagtgggcaaaggatatgaacagacacttctcaaaagaagacatttatgcagccaaaagacacatgaaaaaatgctcatcatcactggccatcagagaaatgcaaatcaaaaccacagtgagataccatctcacaccagttagaatggcgatcattcaaaagtcaggaaacaacagatgctggagaggatgtggagaaataggaacacttttacactgttggtgggactgtaaactagttcaaccattgttgaagtcagtgtggtgattcctcagggatctagaactagaaataccatttgacccagccatccctttactgggtatatacccaaaggactataaatcatgctgctataaagacacatgcacacgtatgtttattgcggcactattcacaatagcaaagacttggaaccaacccaaatgtccaacaatgatagactggattaagaaaatgtggcacatatacaccatggaatactatgcagccataaaaaaggatgagttcatgtcctttgtagggacatggatgaaactggaaatcatcattctcagtaaactatcgcaaagacaaaaaaccaaacaccgcatgttctcactcatagatgggaattgaacaatgagaacacatggacacaggaaggggaacatcacactctggggactgttgtggggtggggggagtggggagggatagcattaggagatatacctaatgctaaatgacgagttaatgggtgcagcacaccagcctggcacatgtatacatatgtaactaacctgcacattgtgcacatgtaccctaaaacttaaagtataataataaaaaaagacatatccaaaaaaaaaaagactcaatgttttttgagctacaggtctccagtggtattgttaggggaacaaagaagtgcactgtgactttcctgggagaagctaccagctgcgtgaccctgggcaaggtacgcaagctctctgtccctcagttccttcacctcaaaatggggataacaatgtatctacctcataggattctgaggattacacaagctaatactaaggcatggagaacagtgcctagcacatcataaatgcagtgtggatgttggtgaataaatagaaagaaaataaactacagattcctttggcagttagagagagacacagagttaaggccctgaagtgcattaaaaataagaccagaagagagaagataagaagacctgaacgtactaaagaagcaaatatttagaaaaagttaaggagctggaagcatctcatccgggttgggatgagtggtggtgggtggttcatttctttaggaacctgagtacctgagggagaaagctcagctgggaactggagttagaaggaaaaagtatcaagagcactgagtgcctccagctggtcctaaagctgataagcctagtcttctggggagaggctgatccctgctgggaacccatcagtactgaggaagaacagtgaggactagagaaggagcaattgtgcagggtgggcaacctagtaacagggtcaagggggctacctggatgaggaggggagcaccaggggtgtaggactgggctggcaggtgaggttatgttcagagggctccagtgggaaatctggcatgtggaggtcggcttgcacagggggtcagcgagcagagacacagaagagcagaactcagtaacacaggcaggggtccagcaccagatcggggcatcggtcacaagagagaagcttggggcaaaatctgggaatttccaggaacacagctgttctgtgtgtggtagagactcaaccatgtgttcaccaaatccatttcctgttcttcctgggtccatgactacagaaatgtcctgggctccctgctgccccggctcccgataggtggaagctggcttgtgactgagtctgaccagtggactatgaacagaagtggggagcatcccaggcttggtcccaaaggctcccctgcaagatcctccactcttaccctttcctgctgactgggtgcagaccaacatgacacgtttgggagatggaagagccatggatggaagaagcttgggtcactgaatctgatttggaacacctattttggaacatactgcaataactacttagatttctggattttgttgttacatctgtcagtgttataaatgtaaaccagtaagctgaggctttcatggatagaatcaatcaaaggttaaggtcaaagacattctgagacttgcccagccttaagatgaagcaatagagggccctttggtgcttggtggctgcaaccgtggctgagttctaggaggcagtttattttttgttgcttgtgtataatttttaccccaagaatcccttatggtgctggctgtgaccgatgaacaaactcttagtgtttaatgtgtgtgtctgtaaacacagggagaagggaaagctgcctgaagattggacaaagagccttgtaaatgtcttggggtgaatgacaatgggaagattaggaggagtctgctggggagctgcctgcaaaggtcccctcttattcaggaattgtatcatcagctgagtcctttggaattagcagacagttgtgaagataaaatagtcttgtagcataagaagccgtaggtagtctgggagctataaaagctcctcattagtgacaagattttaacaaaaccaaataaactttaagaaacaaggacattcatggctgggcgtggtggctcacgcctgtaatcccagcactttgggaggctgagatggatggatcatgaggtcaggaaatcgagaccatcctggccaacatggtgaaaccccgtctctactaaaacacaaaaaattagccggacgtggtggcatatgcctgtagtcccagctactcaggaggctgaagcaggggaggcggatgttacagtgagctgagattgcgccactgcactccagcctggtgacagagcaagactctatctcaaaataataataataataatgataataataataataataacaataacagaaacaaggacattcatacgttttctaaatattttgactcactacatgagagagtgacaaattgtgatatctgaagaaaagtctgggtaaaatttccacaacagactttgcaatttagtgattctgatcatctgaacttcagttccttgtagcttgtgaagagcctatcactttctttaacaatgtattagcaggacagaggaaagtgactttaaggcaagcagtagcagctcgtatattttactaataacgacacctggccgtaagtcaggcggttacagtccctaggtgagcaacaattttagtcatgacacacagacaatattctttgccaaataaattttccataagaagagggaggaccaggcatatttggtgttgaaggattgattcctatttttcagtaaattatgtctctgaattagtgtgcttctgtcagtatgcattctggtacattcaacagttcttattgtttttagtggaatttttttttctttttccttttgtgagacagagtctcactctgtcaccgaggctggagtgcagtggcataatcacaactcactgtagcctcaatctcctgggctcaagtgatcctcccatttcagcctcctgagtagctgggactacaggtgcatgccaccttgcctgattaatttttgaaaaaaaattttttgtagagacttgctatgttgcccaggctggtttcaaactcctgggcttaagtgatcctcctgccttggcctcccaaagtgttgagattataagcatgtgccactgtgcccagctgtaagttgtatttaaattcttttttttccatttatagattgttttgatgtttgagaagttcattgcactgtttgctcccactaaatatttttaaacatttaggaagaagaggctgtgtttcgcctgaggcaaaggactgagaactccacaactaagagtttgtttagaactcaaaacaggatgttctgtttgaccaaaagaaagtttctttctctgcttttcattctcctgttaactcttcccttttgctagcatataaaagataatatcaccaaacagccagtaaaggaacgacttataaaaatttgtagtaatctggcaagatttttcccttctattttgttaaatcttaagattgctcaaccattgatgtgattgttgtttgtgtgttttttctttaccacgccaccctggcattttgaggctgtgcttgggtgaaaaagttaagccaaaagatctcggctatacagtccaaatccagatttatgcaccacgcaagtttccactccctcgttcacagacatacgcattcgcgttgcaatcattttgcaaagggtgattcagagatggggaacatggcgtttcttctgagaagcaaatgagtaggttgacccacagtgctcactttcctgcctcaccgttgtcactgtcctgacaaccttggtgagtttggctatgggaataaaatctgaatatgtattcttgaactttgccaccacatcacaggcctgccctattatcatctaagagagcccccagcaaacggagggaaggaggaaacacccttgcccaacatcagcactttgttctcaatgagttttaaaagctccgaaggcggttctaaggagcagtcaaggctgagaactctgttaacagagcacaggttagactgcagtcctcctgggacagggctgggactctggtgtttgtatctttaagcgctcagcccagcaggcagcacagaagaaacgcccacgaagaacctagggtgcgaaggagcacactctttggtttccaaagaccagtcctggcttccctgaaccctgaaccactgctctgtgtttatggccaactgggacgaaggtgctgggtccacgtggaagatgacactcctccccccggcacatctgcagagaggctgtccaggacagtagtggccttttaaagctcctgcagagaggagtccttgtaagaccaggttgctgctacgtgaggatgaaaaagcccagaactgagagtcgtctctcgtcctagtttggccactgactgagcagctcagtattggtcactgaacctcaatgttttcaaatatgatgtgagctggttgcactcagaggttcaacatccatccttctatttgcccagcaaccatgggagaaggagaagaaaagacctgaaataagggaactttgacagccaagggtggcctttgattctccctcccttgatctgtaagttgttcaagctatagtccacccccaagaagtatcacaactgggcaggtccggaggcgagacaagatgtggattttgacggtgaatcaatggggcattattcagcacagctgtctctaccccgacgctgaaacagggagatccagagcacagttaatgtgagagcagattcctccagaagggaggctttcgagagacccactgggcctgactgtcaggtacaaggaaccctgagcctggcacaagcaagcagcacacctgatctctgtatattctaagagcctgcatgcctcaatttcaaatagataaagtttatcatgtagatggaagattgggatggcattcattcattcattcattcattccaggttttacccctgtactcacagaactgatgagggagaggaagtatcagccactgcgataagggtctagcccagttgggggatacgtgctgaccactggaggaacagagaacaaccaacaaactcaaccaagtgacctggaacaagtgatgccaacagcagcaccatggaagctgaactcaagaagttcagatgggacgggcacggtggctcacgcctgtaattccagcactatgggaggccgaggtgagcagattactaggtcaggagatcgagaccatcctggctaacatggtgaaaccccatctctactaaaaatacaaaaaattagccaggcatggtggcacacgcctgtagtcccagctactcgggaggctgaggcaggagaaccgcttgaacccgggaggcagaggttgcagtgagccgagattgcaccactgcactccagcctgagcgacagagcgagactccatctcaaaaaaaaaaaaaaaagaaaagaaaagaagttcagatgacaaaggaaggttgtgtgctttttggcatgaaaggacattttggtactaatctagaattacagacacgccctatgccttcatgttgaagaagtacaaagttgagggaggcagaggtgaggaatcagccttgtaggtggtgatgtctcagagaggagcaaagagtaaggaaaagtagtatgatggtttctgatccagtgtctgccacaaaccagctttgtgaccaggtgaattatgtcctctgggcctcagcttcctcacctgcgcattgaatgcaaaatacctatgatctcttctgacttgccctgagggcatgatggctggctagacaagcaccaacacccacaatgctctcagcacacacgtacacacaggctcacactcacacgcatgcacacttatgcttgcacctatgtgcttgtacacatgcatgtactcattcacacacgcaccctaccacacacaagcacactcacatacgtgcacacaccaatgtaggcagggatgtgaatacacacacatgctcacacacagccttccatgcacatgctacatccacacatacatgctcatgcacacgcacatacactcctttccatgcactttcacacaagtgcacagtcccccacaacatgcacactctcacatatgcacacatactcatatgctcccgcacgtgcacacacacagcctcacacacatgccaacacactgccatgcacatccacacatctacacacacagatctgagtgccctataatccacactttatttccaaattttcagaaagcagtaacagaccagtcaggaaaggaaaataaaaatcatctggagcgtttttatgcaatcctgatgatctcgcagcctcgggtttagtctctttttccactgcgtagggccagatacttccgtttttacataggtacctcttttagggagacaaagcattaagagcaatgagccaagagaagaatttgaaacaaaagaaaaaaacacgaaaaagaaaaaaagagaaaaaaagcttttcccattcatggcaaaaaaataaaaaggatgtttggagtgttcatgcaggatatttgtataaagaactgcatgtccttgtttactttctgtggagccccatttcctccctagaattcctggtggtcatactcaccagttatgggactctcgagatgaaaatctgtgacacagagcacacacacacacacccaggcaggggagtcctgtgaagctggatgctctgaaatctagggcatttccgaatcaagtatctacctccttgtgccttgccattctctgacctggccccagagctgcaaagagaagctgaggaggacattgctaagggtcacacctggtgacacctgtgtggcctgtggttaacagtttgggaaagtaagcatcctcactgctgcatgccaggacagggatggctatgtgccagccacatcccagggcggtctcgatggagcagtcccctcctgtgggtctctgatgtccccaggagaaaggcacattggtgaggtctcacattcagttacatagtgctcttgcatttcttaccccacttcatctgcacacttctatacattagatagagccctgttttacagatcagaaaactgaggctgagagtggttaatttgcccaagatcacaaggcaagaaagtagtggagcttaaatttggattttcattatctaagtccaaacgttgttctttaccttgcatcatgaataataattaaaataataataaatgataagcaaacatttttcaagggtttactaagtgcctcacgccactttaagtgcattctatggatcaatttatttaaccttacaatgctatgaggtggatacttttattatccccagttagcagatgtggaaatcaagctccaaatggttaagccacttgcctaaagccacatggccaatgaagggagaagaagatgctttggtttactgccctgctgtccagaggaaggcgtgaggtagcccccaacccacaccccctcattgactgctttcaatgtacaacaccataagtatctcactctgtcatggacattcagagaaggcttcaccccaccaatcaatgacaacttactttttccccaaggatcagataattgatctgattatgcgtttgctgcaaatggaaattaacatcatttgcccttctatttatttttgcttttcccactgaaaatgctattatggttatatacgccataaaagaattgtagtaatgttgtatctacattaatttccacccaagagttttcgattttcactttttatggtgatggaggctacaaacgagagaactgcagtggctgtaaatcgttctcttcatgaaaatgtgccagatgaggtgaaggaaggagagcgcaggggtcctaagagtaagggcatatttaaaaaataaaaaggttattcatgcaattatccaatttcttcagtaagtggaaaaaaatcttagggatgtaatgaaaacacattcacaaacgtgtttttaagaatagtattttcccaggccgggcgcggcggccaaggcgagtggatcatgaagtcaggagatcgagaccagcctggccaacatagtgaaaccctatctctactaaaaatacaaaaaattagccaggcatggtggcaggcgcctgtaatcacagctacttgggaggctgagggaggagaatcgcttgaaactgggaggtggaggttgcagtgagccaaaatcgcatcattgcactccagcccaggcgacagtgtgagactcggtctcaaaaaaaaaaaaaaaaaaaaaaaaaaaaaaaaagaagaatagcgttttcccattgagctttcgtctggactgatggaatcatggatggacccctcaccaggccaccgagactcaactgtgccacgtcagtgtcacgggggaggctgaacttcgccatccagccctgaacacaggatctcagtgttgtctcaaatcagcccttttgcaggcatgcacagggtgtctaagagtctggtgttaagttgaaaaggtctaatgtagtgttttaaagagaaaaggattctccagccccatagtggtgagaagtgacacagagtcacattacataaaatgacgaggcctgaggtgattgtgacagtgagggtgactcattaatcccaacactgggatcctctgagctctccctagcagggtctcaaatgtttgagtgaaagactgcagctagaagactgacaaaaccacactgaactcactagggcaactgcctttatttccaaggcagcttccatcgaagggagtggcaattcatataatcaccaattgctgaaagacatcttttccacgtcagattgaaaccagttttgcagcctccttaatgtaggtgctgtggctgaggcaactagagaaacagtggacgcctccctggccccacttcccagtgccttaaagtctgagaaaaacactgattgacatttccaggctgctgtatttccctcaccagccccaaacgcccgatccagcttcctgcaactgtggcaagggcgtgaatgtccccaggaggcaggttgcagagttgtttagatccaggactgcatcccagtttgtccatctgtgtgtctatgtctgagtgggcgagttgcttctcagctctccgcaggactctggtgttgcttgttgctttggcctggggctgattcctccaaagcaatgtgtctcttcgcagagtctcttagagctgcaaggcagtatgggatcatcagagaggatgctaggaagcttcagaaatggaggtcctggtagaaagggtcctttggcgtggcctctgaagagtccaaatgtgggacaagaccctccgaaagcggtggcctggggagccacaggtggggcagccagcacggaagagggtggctttgctaccattgggaaaacttatcctccacatcctcatgaggcaaacacctttcctaccttaccgctcctcagtggcctccctgttgccttcttattcaagactaagaccctctagaatgttctttatcctgagtccagctgattgtctatactaatatcagtacggggtgtagatgaggacaaccagtgtgcctggctgccaggcaccccctccccaaaccccaggagtttctggaacattccaactctgcttgagggtatccatgcagcatctactactgtgagcaggtggtctgatctgtggaaaacttctatgattcacctgagggtaactgccctttgtgatttgaaagaatgatgctaacagaaagtgttgtcatttctgaacttttctgaactctgcagcgagtgccaaattcatgtattttaggagacctacgtggttctacatgtagctaaaacaattcagtaaccccgccggcaattctgcaatagttcttggagtgatgaaatcaagaaggaagagttctgcctccccatttagaaactgttgagcagaaaggtataagtcaggcttttcctattacaggtctccttcagtgtgaagaggaagttcagttttcatttatctcttgcgccctttgaagtacaggcctctgtctgcttaatggcccaaaccggggcgactacgatgaattccttttacatcaaacacaaccctgtctgaaaaggcagtaatatttctcaacatgtaaacctgccacgactttggtgtttgcaagctgaagatggttacccagtgtggttgctaatggagcaaaaatgcgcatagagcagggagcaggtggaggtgactggggaccctctgacaggttgtctagccacaaacccatctcttctaatccattctactcacagggcaggctgtctcctgcaggggccaacagagaaaaaaaaaacacagaaaatggggatgggagaaagagaggacaagaaaggaagaaaagatgaaacgtggagaaatagcaaaaggaaatgaaaagaactttattgctcagtttcttctgcctgacccaattatcagattttgcatttaagtttaagacagtagatcaaacagcgagaggcactttgtacttctgccaggagaccatatgatatctctcagtgactctcctgcatgccaggaacacggacccatgcctcttagctgggtctgcatatggtgcaatgcataaaaaaaaaacagcaaaattcataaatgactgcactcgtgggtgatgtccaggatttacagcgctttatcagttaaagcaaaaaaaaaacaaaggccaggcagaatctaattataactttccacaaataagtcaaaagtggaatgagaactgaaagaaagacaaaagactggtgtcacgcttactttgcaaaattgatcatcttgaggattgttttatgtgggatacagaacattttacaaggtatggatcatatctgttctggggattttgacatttcttgcagtgaccatgtgcagcctccatagatgtgaagggctggatggcagacgttcatgtcttccttctccaagctatggcttgcctccagagataattactttatgaacacacttgttatgcattgagataatttatgtgggctacggtatttaacactttttcatgccttcagataagactttgtgcagctaaatgaaatagatgctttagaaaggtctcttttcacttcccagaatcatggcaacatcaggaaaaggaacctttcacttcaaggctgggggtatgtcaggagacgtggtggagagatattctactcatcacagcagttagttttggaagcaccacagatgactccaacaccattaagggtggcgaaatcaggttggcaatagcagcacttacttttccaaattaaatcagttcatatgctttgcagattgttcaaattcagcccttttcctgggagaagacagatgtggcagaagaacaggggcactgctgttttattctgatcctggatggctggggttttaagattggcctttgccctcaaaagtcaccttcagccttcagaaaaatccttcagtgttttttcagccctccacttcccttcaccctttacattttacctcactgggctcctacgttggtcagaggtcgtgttccactttggtgcactcttaatgtgtgcatattattctttacatctgcaaactcatttaatccccacactaaccttgtgaggcaggcaccatggttgtgttcttgtatggactatgatggacccactgcacactgatgaaaaccatggccttatgtagcaagaggttaacagttggtcaatctgggtgaagagtatacagccattctttgtattactctcgcaactttcctgtacgttcaaattatttcaaaattaaaagaaaaaaaaaggtctccagagctagataagtttggattgcagtaatggctcaactacttactagctgtttgtaaactaagggttttatatctatcgcccatttgatcctcataaacttataaggttatgttggtatatagtttatgtaggtattatacatttatttcagctgtgtccatgaggaaactgaggctcagggaggtcgaagaatgtgtccaaaatgcctgggattatgtatactatgctgtgcttatctacagtttgaattgacttattagtattaggctcctagagctatgaagaaatacagtgttagatcagttcttttttatcaaagaagattttatgaggacacacagtagctgccaatgaagactctgatcttaaaagatatagcatgtaacttaaaatttcttaacttcccttaattgatttctaaataatagattgataaggagaatcctgggaaaggccaaacattgagaattttgttaatattaattcttccttataatcactctaaagaatgataattcttttgctttatcttaagaaggtactttactatctggatcatttttatcaccttccagatacatttaaaatttttatcagccatccatccatccatccatccatccatccatccatccatccaaccaccatctatcttatccacccacccttccatcatttattatgtatggcgtacatactatgaacaaagtctttgtcaaagaaggaaaggtgcatatctagccttcactgaagtgaaggagggaatacaggcctaactacaccagaaggtagggcacaggttcccatgtgagggcaagagatagggaggtaaactccggcagctcagaggggacagaaaggcttctttggagcccatgaattgcaacaatcaaacctcaagcaccacatattttacagaacaagcataacaacatgttgtgtggttcaccagtgcctaataaaggatttctgtggcctaccctgatgaagcagtggattgcactgatgtcttcactgaggaatgatctcaggcatgattttaatgaccctttgcagggttataactgatctcttagagaccataattttaaaaatatagtttagaacactttctcctgaacacattaacaggccaactttcaagtttacatggcatttttatatccactacccaaatctttctgtagttcattccatttatatggcacctggataagctcatttttaccagaaaaactggaaatttcactgcctgtcctgctctgactttcagatgactcctaaaatattgaactaaggagcccaacattgaccactgggggccttgaattcatacttttcatctagggaaatgtccatttggtttctgccttcatatcaatattctatggcaaaacattttccaattctatggtaattaaataaatagaagttttactaggttccatgacaaataacctctggaagtaaaaattatttatatctctggcctcatgtgtccacttgctcattatctactcaaagaaatgtacaatatacattgccctatacagcaaacaaatgaaaataaccaaaagcaaactcctgttcctaaaaagtatggataaatgcaatttttgctttgtgctttgtcaaatgaatcatatgttaccatcactaaagacatttgctatttgatagaattctgttgtgaatcttatcataaaataaaacatttctcttgattgatcttctgtataagcaaggtgttgaaatgttaggtttagagagacaagactttctacttaaatgaccaagtggtttgggactttgcattgattaactctacaaagaatgagattggtggtgtgcagccttccatacagcaggcatcatttggcaggcatcttcttttataataatcccattgtccagttgcatgcaactggacccacgggttggagagagcctgatgctccctttgacttttctccctcaacatcttgctctgggtgagatcattaatctattatttttacattagtgactcccaaattcatgtctccagcccagaactatttccttggaattctagactgacatttctggagaaccttgagagctcttgttgtgtacttcatggaatcctcaaaaccaatatatcccaaactaatcacttgaatggattccccagctcactagagataggcagtaaggctctttctccctccatctgtctcttagagactatctcatagttttcagtcctgcatgcttatatggacaaagggaggaggcagatgtaggaatcttttattcaggcccctcacatctctaaaagatagtcccactttggtgcctgtgatgttatattgtagtggttggtgtatttgattgtctcccttgctacatagttatcatgccaaggacaaatttttgtctgtgaatggagaagaacgagggaagctcaaatccctgcaacgtactggcttcctgacctggattggacaagtcacataatctttccaggactaatccagtgtcatcatgtgtgggaaatttttgtatgtgaattttatgatactatacatatataagtgatttttaagaggccatttattttctcttacagttttccaaactttgcatgtattgatataataaatgttttatcactgatccaatccattcttcatgcattcatcattacaatcctcctataaatctgcttgtaaatcccaagtactagtttaatttaccaagagaacaacacaaacctccctccatgtcatagaaaactcagtttggagacactttatattaaaccttattcccaaatgtcatcaccacccagggcaaatggctcatctgacactgttagcttctaaggaacattttaatcctttctactattgccagcatagcacatgaatgacaccaaatccactacaagtctccagggagaaatgcatcgctgatatgatggctttatctacatttacacattgaggggaaaattgagcttgttttcatacttccacaagtgcactcttctagcccactttgcctttattatctcaatatttctgatgaatcggaattttggcctggattatccaaagaattgtttcagatctctttgcctccacacgtagatggagctttaggctatgctcctcccaccccttcataaattcatggcttttcaaaaattttcttctctgttttcgtaaaagccaagtgcaaagagagaaactaactgattgtacttcttcttgatatgcctgatagttttctgtcatcttaatcatcacacgagcaagactactcaacacccaggccttctgagatccgaacaataagtaaccaccagtcacctccacacaggctggccaggggtgctcatggggcagagtccatattagctgaagacttgcctgtcctctgccagggaactctacggaaacgagggcaagctttgcatgaaaccccatttgcaaaccgaaaccgtgaaaaaaaaaaaaaggtggttcagtgtggtttttactcaaaaccaggtgaagctttgtggttcagccaagttttgacttgaagccggagagagctcactgtgtttggctggaccttgttttacatttcatgttccatttggttctgtttcccaaacctgaaactgagggttcagatgaggggcacaaaatgaataaaatgaagttgacatgaaatgtggtgtagatgaagacagcaccagctttgtgatgccaactcctgctcctgctctctgccggcactccttctagaaacggccttccccacactaagtagttccctgggacttttctttaaggaacagaatgattaacactatacaaaaatagcaaaggctattttgctcttgtttattttaacagatccattaacaaatctgtttttgtgagtcagccattgagacttttgaggaaaacattttaagtaacagactgtgacgttataatggcatgaatttatttaatatgttttaaatatctactatgtgctagaaattttaacttattaagttctcaccgtattttatagatgtggaaactaggctcagagtgattggataaattgcccatatgctaaaagagaaggcaagcaagtgtaatactaggcagagccagctagatgtggaaactaggctcagagtgattggataaattgcccatatgctaaaagagaaggcaagcaagtgtaatactaggcagagccagctagtaagtggtggaggaaaagacttccccctggatcttttccctagctattttcattagacctcaatacctacaaatcagaccgaagttctgccctccgggatattatgaagatacatatttggcttcataaagaagctctgctctgcttctatggatttaaccaactgtggatctctctacgtatagatctgtatatatggatggttgtctgtattgaacatgcgcagacttttttcctgtcattcttccctaaacaatacagtataacaactatttgcatagcatttacattatgttaggtattataagtaatctagggttgatttaaagtatacaggaggatgtgcacatgttatatgcaaatactacaccattttagaaaagagacttgagcatctgaagatgttgttattccagaggggtcctgaaaccaatacccccatggatactggggggtgactgtacttaaaacaatagtgtgtggtggaaagtgctaaacttcctaaaagttgtccaaatggtgagctgtgtgggtttagaagaggggagagaaggcttctagctagggaaggaggggtggagagggtagcaattgcaaaaatctttgtaaaaacagtgacatttgtgacacagaagagcagttgggtgtgtagctcttggggggcggaaatagttttggaggggagacagggtggctgaaaacagagaagagagaggattatttgttgaagtgaagagtttataaaggagagttaaggaaagtaattttggaaagatggattgagactaaattatggaaggtcttggtttcacggccagttgagttgtgttttatctgcagaagaaagctatcaaatatttttgagtcagtattcacaaaatcaggacaaaatgtaggtgaaagccagagtttaactctgaaaattacttgtgtcttattggaaatttggagggagattgaaaaaaatacatcaattggtctttccaaaaaaaaaaaaaaattacagaagaaaagctaatcattttcacactgttcaagctcaatgagatctagttgagattacagattaatacaaagctcttgcttacattttgaagttagtatttattagcacatatcttgcaagagtatatcatcaactgcctttcccaaattgaaaaatttcctcaaatatatgggctccttttttcatgatcactatccttccaggagaaaaataaaattaaatttaaattctccctaatgagggaagtaaaacactaaggaataagttttatccagtaggattgagctttggaggtccacaagtcattataattgtaagactttttctatccctgaatactaattttcatccccctgggtgcaatattgctcccattgggactgcatggtgtaggcccaagcttgctttgccatgacattttgacgaacaccgtggaagctctctgatgtctggtgaagtctgcgtcacagaagggaggacggatacaatctcctagccaaataggttgacaattgataggctatgtgaaagatttgattcaaaaatcaaacagagaacctagagaactactggggaagacaatattgctagagcaccatgatcagttacatgttggttattatacgtcccttaggctaccagtgtttcctgtaaaataatctgcctttattttttgctacgcattctgctaggtgatatcggtagaaaagttaaaaaaaaaaatgctagaggtggatctcacaaaacatagcagtgtgagggtgagcatcaacatagtatgcctctgaagtcttgaatttactcttgctatccaaattacctcactcaaacggggaaatgttccttccattaagtaatagctgtgaaaatatttatcttcaccaattcaatggatattctttggagaaatctctgtctaatttaataaattagagtggttgagcatataatgttgtgttttgttgttgctgccgttttactgactatggctattgtgtgaatttctgtttaatcaatcaaaattatccattttgtctttaaaaagaaaagaaaaatttgaaaaataagagtagtctacacggtgttgaattccccactgtacccaaagatcgatggctcatccttctgaagaagggaattttgagccaatataataataattggtgaactgctattatctttcaatgatcttccatttagaggaaaaaacttactgcttttacaagctctggaaaactaccccaggagggttatcttggttcactgagcttgggctatggatttaggtaccaagcagtttgacaatcttatacaatttttctttggtcaagtcactccaagactcctatcagccaaaactataatttgatggttcatcatttttaacctattactacctgcttttgcggagagaggggtaggatttcaatcccaaaacatactttaaactgtcattacaacatatacacatggaagtggggacagtcaggtatttgatccagactggattatgtgtgacttcacacatacttttagaagttacttctacaaagatatttggagcttggaaacacactggaatgacttggctgtaaacctgaatggagaatgtcgctggagaggccaaaaagctgtctccatctttcttccaacatccttctagtgtgacctattgctatgtaaggaaggtaactgttattccatctacttcatagttttcatcatggattcatgaggcaatgtgtaaaatgtccaatgtctttagagtaaacagcattttttttttttttgagacggagtctctctctgtcgcccaggctggattgcggtggcagtgatcttggctcactgcaagccccgcctcccaggttcaccattctcctgcttcagccattctcctgcctcagcctccagggcagctgggactacagtcacgtgccaccatgcccggctaattttttgtagtttttagtagagacggggtttcaccgtgttagccaggatggtctcgatctcctgacctcatgatccgcccgcctcggcctcccagagtgctgggattacaggcatgagccaccgcgccccgcccataaacagtattttttgaccaatgagaaatctgtaaaaaattctgccatgatgacttactttctattgataagtatgagggtgctcattctacgttagttttctacagaactcaaaaataagtggtccttgtggaataaatgaatggaaatgttgttttacaaataaaaaataaactttcctttcatttttactgtcctcaggaatgtgacaaaaagcataattttgatgtgttattatttgtagtttcccagaaggaaaaatatactgtcaaagttagggatctatttttaccagtataacaagatgtcactgggagaccattactttattggaaagtttttgtttttttaaaacttgtctactgcagcttcacatatttcatagttgtgtgtttcctggttaaaaagcacgaaacttttcaacatttgctgctcattttgtgagccagatcaaggcaaggaaattccaatatttatgaacaactgtagagggtaattgaaggatagtctgctgtttctgccagttctactgataaactgtgggctgttgtattgtttaaacctctgtctgctggaaggcttctttttctgatactgaagcatgttttcctaagccacctggatgcaaagaggagattttcaggtgaccttggggtctctcccttgccagacttctcagacaaaacacacacacagatacacacacacacacacacacacacacacacacacacacacacagcatctttgtccatcctgggccaggtaggttcttatgagacagaccattatcccttgagtttgagagagtaaagatctctcgtaatttccatctcgcctgcaactctgagccctgaaggctccagtcaagcacagctgactgggaactgtcaagtctggaggatgctgcatatattcccatgcctgggttctggaatagcatctgtgacccacagcccccggaataagagaaagagtctttttggatttgattttgttcatagatatatgctccaagatatgcctcaagcgttatatgctatacatcctcataagtctttcttataagtcatagtctttataaccaatgctttttttttttgtttgcataggttggcaactcaaaggtcagtaccaaggattctctataactgccattgaacaatattacaatatttattaaaaaaatctttccataggtattttatcaggtgctctacaagagaactacataggcacatatgtggtttggagggacttacagtctcattcaggaagaccttgacaaacaaatgctaacataaaaaccaccagactgctatttagccattctgtctgggatgactatattaattattttatgacagcgtttctttccttctgaatggttgttaccagcgaggtaccttttgctcaatgtttgcttaaagacatgtctatatattatctggcaagtctatttcacgtctgttttaaagtcatgtcggttttaagtgcattagatagcactctgatgatgttcacagtagtataaaaacatcagctttgaaatgttgggctccattttcattaacaagtttttttctccccttggtcccaaagcaacctaacagagaacagagggtaggaccaagagtgaggagtgctgggtctgccaggtggagggtgctgggttcgtctcagtgggctccagagccaggtcgcctgccccagaacacagctctgcccctgctagcgcatggccgaaagcgagctacttgctgtaaaatgggattaaacaacacgaatcctgcaggttggtggaaggattaaatgagtcaatatacataaagcgcttatgtataagtacctggcttgacagcaaaggctatataaagatctgctattattactttggtcttggctttgtcactgaagagcaggctgtggagccccactgagtctcagtctcttcatataaacagtggacgaagttctctggaaccattagccttgtcgttttctttctaaataaggcatcttgcaagtacccagggaaaaatcacaccaaggaagagaccacacaatttattcaccaacgcaggccagtgggcataagccaggccagtatgggtcaccccacatttatcaggtcctacgtagcctggggatggggtattctgcctgtgaagataggaggagctgggtcttgtttcaaattatgagggtggtatttaaatagcacccatgtttggcttcacacttttcccgaaatctctctttattcccgtctcataggcagaatcaggaccaacatcactgaacaaagagacacgaattaaaaatcagttgtttggattttcatttctgctgagtgttctcttttaaaatgacctctgctatcccgagggaaacagttttccccattactgacggaaagtgaagtctcctcagaaggaggatttcccttccagaaattcaaaaccagaaaaactatcaagacactgtgattgtgtgccagtgaacagccgtttccaaagatttgaatggaataatttgtttttcatggtttgtaggtagcagataaaacttacatggaaaaatggacaagaagaaatggaaaataagacacagaacctggaatcatcagcttaaaaagcaatttgctttatttcagctgtgcccagaaatagcttgaggttaccaagtgagtatttctactggaagcatcagctacaattaggtcaccaacttagagaagacgtaggcggaaatttaaacaccaagtctatcattataaaggtactttatcagcaaaactgtcagctatggatggttgacttaaaattattaagaggctaaaatatcaaaggagaagacaagtctgtggaagggtccctcctaagatcaacaacagctgagggtctaaacatgaggaagcggctttaatagcattgcttgtggagttcgttttgaagtccttaacttccacgccaatctgatgtgagaaaaatagatgcttccctttggagtccttgttccaaccatggaaacctgggacacacacttaattctgctggtgacagaatgacaaatctgttattgtttaggataagtgaggcatggcaatactcttctgaatttcggtgaaaattagatgtgaaaatctgtaatggtactattcaagcttccccttaaacaagaaacattgagcaaataaaaatatggagtccctggacctattctagaagcctggtgccaaggaatagattttgcatggatcagcttaagctcacccaggaatggatttaactttctcctggaaaatttatttgaaagtccaaaaaaaagagtattcattatttatggatttagtaatgactagattttacaaatatttggatccacatgagccatggaattcagaataatattatttcctgccatattggtaactgatttttcaaagaagattttacttgatagttaatttaatccattttgcttgattattcaaatgttccaaaacacccagtggtggcctatttttttttgtctcttttcactataataatatggcttgatgtttcacaatggctgtatctgtttccttagctacaaaatggttctgagaccggtctttctgtatctgtaggtcattgccatcagtgcagcaaggagcccccctcaacaaatctctcttctttatatggggctgatgcttggccaaaagcctgcaagggtgagtctcagaacagctgctaaaaatgcagctggatagtgagacagaagtgctcaatgccagttcgctgggcacattcgttagtacatgccaatgctggaggagccgtacagacagaaggcacttcatttcatccgcaggtcactaaatgcctttgtccatttcctgcctttcctttatcacatggatattagcgcttatctactcaagtcattataactataaatcgctaccatctttcttaccaaggatttagtcttttgtgccacatacaaggtgtagagaattcttctagggatagacttctaagtccaagctacccagggaactaccatttacatcattcattaagtaaaataaagattgttgttgatgaaggggtagctcttactagggtcccagggttagtccaaggctcaattatgaagtcaaaaggggtgtgtgtgtgtgtgtgtgtgacggaaagaaagagaaagaaagggaaggaggagagagtttggattgggaaagttaccatccactctcctcttagcatacctagttgtcaattttctgtttatgttttatatagcctcattaatgattgcgatactattactatgtttactttttttatttttattttttgagatggagtctcactctgtcacccaggctggagtgtagtggcgcgatcttggcttattgcaatctccgccacccgggttcaagtgattctcctgccttagcctcctgagtagctgggattacaggcgcgtgccacaacacccagctaatttttgtatttttagtagagacggggtttcaccatgttggtcaggctggtcttgacctcctgaccttgggatccgcctgccttggcctcccaaagtgctgggattacaggtgtgaaccactgcatgtggcctatctttacttttgaaataggaaatgaactcagaagttaaaccatctttcaaggtcttataaccgttaggtggtagaaccaagatttgaagcctagttggtctgttgccaaagtccactatattaagctgtttcccaagtgaatctttaggaacattccaggcacctagttcttcatcctttttggttctttctctcatccatgatgtctggtaggttacaaagagagaaggcattaaatgtgttgttaaccagcaagcgcatgaggtagaaattttggaggattaaggctttattgaacccaccaaatcatactccaggcatctgtcttgtttttcactgtagcttctaggaaggttaagcattagaaactcgaatggtgatgtgaatcataggaagcgctaagctaaactactgaatgagtcattctttccagagacaatggcccttatttctctcaaactcttaacagacttacaaatgagggtagaagaaaagctacttaaatttactacccctactaataacaccaaaataaatttattactctactacagagctttcactttttcataagttgttatcaacattttgatttttgggttatcagaacatctaacagcatgttctaaatgtcaaataaaaggtaattacatgaaatgataatgatatacaatctctttactgtcttatctaagacaatctcttttgtgtgctgggagtacaacaaacttgattcttggctacctggggcaggggtttagattactaagaatcctagaactacacacagtctgccataaaacttatctgtggaggagaccattgcaatagctataactctttggtgtgttgtggggggaaaatggtttgagactcactatttcagaggaagtggtggcaaaaggaagaggagaatgaagttggtagcttgcagaaatagcagagtggagtagctaaaacttagctagtggtttggtgtgggggtggagcagggtcatcaccattaactctgaagtttagccctgctgactcaggggccaatggtgctgctgccagaaataggggagctggaaaatctgagaagatgattaattcagctggggacatatttgcctcaaggttcctcagaggggcatccccagtggatgtgttcagaagtcaattgaaaataaggccagcacccagaaatgggctgagctggagggttagagttgccagtcatgggtctatggtgttcaagacaagagtggccagattcacaaagggaacaaggtggaccagagagagaagagagcctgggacagggtctaggatgtatttggagtaagagagaaggaagagtagctagagaaaaaaatgtggaaaaagcagtgataataagataacagaagaaatcatcacagtgtgaaaaagcaaggccaaggatggataatttgttcttggaggatgaagtggcctagactataagccccagagtagcaaatcagttagcaaagtggccaatctcagtatgtcattgtgcaccagaaggtcccatatgagggcagaaaaaaaactatagaactatacacagtcttccatataacttatctgtgggggaggccactgcaatagctacggctctttggtgcgctgtggaggaaaaatggtttgagattcactatttcagaggaagtggtggcaaaaggaagaagagaaagaagttggtggcttgcagaaatagcagaatcaaaaagaagagtattttaagacaagagaaatgcccagccagtggagagagaccaggagtggagaggagagaagtgcaggaaggaaaagaagggaatgaagggttgatggaacagttctagaggaagctggagggcttgagtgcagaagcacagttatgtggcacatgtctgcaaagtagttgggcaaatacaatgtccatcagagagaggtcacatgaagatgcagatagaccccgtcatgtgaaggaaggaagtgatcaggtactttccatagaactcatttctcttctcaggaatacaggggtgacaggatcttcccagaggacaggctgcatggtatgggggtcagggctggcagcccaggccaggtttggaatagccccaaaatatatagcatggtaggaggttgtgcatggatatattgagtattcagtgcacaggttaggatgaaaaaattgtgtcaaagtagttatgtgattccaataatacttagaagacttagaacaagagcagagaaagtaagtggtcatcctgagttaataaatgaaggtaaagaacttagcactccattgaaaggtacagtaatttaatattgatattagattgatgggtccttcatttccctatggtctcatcatagtttcttgcaatagggatgacagagcagggagtaataggctgccagcaggacctcaatggagtgacccagtcttgggttcaggcccatcggggcagaactaggtttgtcaaagggtgcttgctgactggcttggagagcagaggtagccagaggtgtctggggtcaccatgaagacggcaagtacaatctgtaggagtggaataggcagggaaggagtagaagctgtggatggaagaacattccagaatgtgagatcttggagatgacacgattttttctctgaaagctctcagcccatggtgagcattaaaacactctcagggcaaccacacaccaatccctatactgacccctactccaaatgtttagggtggagccctttggggataccatatgggggtttctttaatattcctcagtggacttggcttcctttctcacagacagacagggactgttatgaatggggtacacacctattttattcactcatattttattatcctatattatattattatagtcatttcactgccaccaacatttccttctccaacgatgtggtatgcggtgtaacaaatggttttagagaaagtgtctggtggtctatcaacaactctgaccagactttttttttttttttttttttttgagacagggtctcactctgtcacccaggctggagtacaatagcacgatcatggtcgctgcagcctcaacctcctaggctcaagagatactccttgtctcagcctccaaagtagctggtactacaggcatgcaccactacactgggctaatttttgtattttttgtagagatgggttttgccatgttgcccaggctgatctcgaactcctgggctcaagggatcccgcctcagcctcccaaaatgctgggatttcaggtatgaaccattgcacccagcccagactgttttggctgatcatttatgtccctagatactgtccactgtttcaccttccagtctgccttgcattaactttcaatgctctttccatcaaatcacactgggtcctatgtcaaaggctggcactgtttgtttcctcaaacctgaaagttgaaaggtcaagattcaacatcatgcaccaagagtttagtctgtggaggaggtctcaaaattgaggatggaataactaactccacaagatgggggcagggagcaggagatatgtggcatttagcaaaaaagccatggttccctatgtgtctcccaaatatccacatctacctagaacctcaggttgtcacgctttttggaaataaggtttgtgtaaatgtgatttgttaagatgaggtcatactagattaggttggctgctaaattcaatgatcagcatccttataagaagaggagaagacacacaggggtacacagagagatgccatgcgaagacagaggcagaaactggagtaatgcaaagatgactcaagggatgtcaagggttgctgggagtcaccagatgctgggggaagcaaggaaggatcctctcctggagccttcagagggagcacagaaatgccagcgccttgatcttggaattctagcctctagggctgtaagagaatacatttctgttgttttaaaccacacagtttgtggcaatttgttatggcagccacaggaaactaacacagtcccctaacctcaaccactgagcttcactgactagctgggaagtttctcccaggaggccatgttgtccctgaagccagtcccaatgggaccgacatgattgacaggccagggaagcctcaccccacaaggctgcatgcccaggtaagtgtgtttcttgcaccgcccttgccatgacaatggcttgttctgacttacggctttgttactttgaacttcaatcaatggctgaaagaggaacgttgttttgactaggctcggggtttctaaactccccactgtgtggtttccaggtcagacagtcaggctttgttctgtgaatcattgctgaaagattcaattaaatctcgcttcgtccgccttgtggccagggtttcagtgacttagcaagaacaggagcatgtagccagttgctgaggaaagccagacatttgaggggagcgggctgctgacacgaggcagggagcacagagatcttcggggctccagacagcggtgaagaatgaagtccccaggcgcccagcttcttggctgagaaggcagctgttgattcctgacatactaatttaggacccgaaagagaaagtgagggggctttgtaaaatcacttaaaggaggctgaatgtcaagggggagatgagccatgtgttagcaccactgtccttttcacgcaggcatgagaaagaatcacaaatgtgagtctggttgagatctttatggttaggaggcctcctttgaagtctgacatcgctaaaaaaattctcataaaaccaaagagggggaaaaaaagagcattttatcctagctaggagagcaccaaagtatgtggaaaggagaaaaggctacagccctctgcagaaacaggaattcggcagaaccccaagtcactcagaaaagagaaaatgaaagacaagatttcttgaagtgcctggaaaatgctagcttcgtgtgcagacttgctctagaggggacagtcttgtgtgatgccagagatccaggctgatgaacaactcccatccccagggcacaggtggcctgaaatcacggagattcttagaacctcagtttggtttcttatttatagaatgagacaattcatgccacctctcttttctcttgcaggattttgtggggctcagaggagttgctgtttgtgaattcactctgtaaatttctagcatcctataattgtagacaagtcagtatgcgcccctcctcaaggctgggcttaggatcccaagacatccctattgcctgcaccacatcgggtgccagctaaggtagaggaggggtgccaaggaagatcagagaagcccagctcctggtgcccctggggtcagtacggtccttcttcccttgtatctgcaaaggacttgtggacacagccgggggaaacatggttgctaagagactggcattgctgcactttcgaggacaccaggcgtgtagtctcatctttcatcaacattcctggggctgctcctttcatacatgagcccagaaggaccagggcggtgcagatcccagggaaggggatggcagggctcagctgcccagcctgctgtcctgctgtggctctgtgctgcagcatcatctagtactttcaaaaactgtgctgtgggcactcgcctcggctcctgtacaactgtccttcccatctccatctgccaaactcattcttacccctaggacctgctgagatgctgcctctaccatgaagccatccctgagaacagtagcttgttatttctactgctgcttccagctttgattggctcttccctactcatcccctcacctgacatccggacagtgtgtgcaacaacttattatgattattattgggatggtctcctccggcacccataatcctgtcctgagtgagcaccctgcacatgaggttgtttgagaacactggctgaacctgtcaacagttggtggattctgatccagtagctgatagtgggcaggagaataggggtgtggctttccaggctctgaggcccccacatcctcaaagggaactgagatgatcccaataggtgcaggttcaggcaaagtggagagatccagaacatgtgcctttggctggcccagatctctctctctctctctctctttttttttttttagatggagtttcactctgttgcccaggctggagtgcaatggcatgatctcagctcactgcaaccttcaccttccacgttcaagcgattctcctgcctcaatctcctgagtagctgagattacaggcgcccgccgccacacccagctaatttttgtatttttagtagagacggggtttctccatattggccaggctggtcttgaactcctggcctcaggtgatctgactgtctctgcctcccaaagtgctgggattacaagtgtgagccacggcgcccggccccagatctctttatactgatctttgccattctctactctgcttggggtagcttcttagttcgtactacagcttaaatgactgatagttttacctttctaggagagctgacttctcagaggttacctaagcttgaagtcaaaggcatgaggctgtgctaggaggtgtgggggaggaagttacttttggaagccagggtctttcccaggcttctgaaatcatccccttgggcaactgcctggcatgatgtgtccctgattaaagcagtttctctcctcctagtctacttgggaagctctgaggatgattctttctcttttgatacatcaaatccacccaaagcagcttctgaaaaaactatgaaaaactggccacaggagtgtttgttctggtagaatttaaatgtctttgtgctgcaaaagctgaaatgtctagtaagatttctgaccaaagcctttcagctcactataagcattggcacgaagggtaaaccacagggatccagctcttacaatgcttcattcccttctgcaggccctagagactccctgggctttgcctgccacatctgtacactggggagaaggtggattacctcttacgctccaagtagcaagtcatttaacctcactcctcatgggttggggacgggagcatgctcacagggtggaaggaggatgaaacggatgcacagtaaatgtgagctgttttcacaattacaagtctcacctcccactctgagcttctatgactctatcgttcatttttctgcacagggactgactcaaggctctaaggttctatctctgtgctgctgcactgagctgctccctcctgaatgtctctgcctgtcagtttcattcagagacccctgaccaccagtaatcatcagatatttcatgcagctgggtgaggcatcagatccgacaaaataggaagattctttttaaaaccagaatctctaaaatgagtttgtttgtgatgcaagtagggtctggatcctacaaaccacggaagacttgcagacaaggcagtttcttctggaagcttccccagggaagagcaggaacccccagaatggcagagctgcacgtgtgccgctgtgtgacattcctggtgctaaaaagaaacagtgatggatctttgccatagtggggaaaaatgagccagtgcaataggcctagtcataaaaggtggatcagagggagggttttagttgaaagcttttgagaggttgagcttcattatcctgctgctgttatatgatgaaccacagagacgtgcacccataccactggggctcttccattaacggatataatgttgggatatgaggaataattttttttttttgagacggagtttcactctgcctcctgggttcaagtgattctcctgcctcagcctcccgagtagctgggattacaggcacccaccaccacgcctggctaatttttgtatttttagtagagacagggtttaccatgttggccaggctggtcttgaactcctggcctcaggtgatccacccgcctcggccttccaaagtgctgggattataggagtgagccaccgtgcccggctggggaataaatttttgctatacattttgcataaaagcagacaaatgctcagtaactttttcatagaaacatctgtaactctgttcatgaggagaatgccacaggtcactcacttatttgcacaaagagccgtacagttcaagggaacgctgtgtcattctgtccaaccagggggttagagaatcactgatcactaaagccaggagcaatgctggaagcctgtctccactgctgcgctggcgaagaccggggcccagcctctgtggttccaccttgcctgcctctcttgctatatcccagctgcttcaggttttctgaacatgccaggcccctacctgcccctagatccctggacatgcctttacctcctcccgaaattccctcggtcctctcttcccttggctagataccccttgttaaagagaatattcacatctgccatggctccctcagcctgggtaggcgccctgccctgtgcattctggttggccctatgagtctgttcccttctgtgtcacccccagtggggcccttgatgacatggctgtccatgcagtttacctctacatagcagctacgggcacttggctgactttatctgaccaaactgcatagctatcactatgtgcccggcagcattcctagcagggattacgatgatgatgatgatgatgatgatgatgatggtgatgatgactgttatttctgttttacaggtggaaaagcagaggcacaaagcggtgatgtgacttgcctgaagtcacacggctacaaagtggtagataggggaacggctcccacgtctgtatggtctgaactgggttgtgtagtgttccccaaagttcatgtccacatagaacctcagaatgtgaccttatttggatatagcgtttttgaagaagtaactggttaagacgaggtcatcctggattagggtgggctctgaatctaatgactgatgtccttataagaagaaaaaacggacagacagagggaagacctcatatgatgctggaggcagagactgggctgatgtagcccagaagctaaggagtgctggcaactgctgtaaggtagaaagaggcaaggaaggatttccccctagagcctgcacagggagcaagggcctgccaacaccttgattttggacttctggcgtccaaagctgtgaaaataatttctgttgttttcagccacccagtttgtagtaatgtgttatggcaagcatgggaaagtaacgcaccccctctcaggagagtgaagcgggcggtgtctccaggggcctggacatttctgccccttcccaggacagggtacagagccagcaggcctgcttccctggaagttctgcccggtggtggatgtagtgggggactcccagatggcgcacacattgcacaggcaggccagcatgttcctctcccaagatggcattttgggaggtacacagtgctggagcacgagccaggagcctggggcacattcccggcagccagactttggaaagcaggaggcagccacctggggcttcaatctccctttttagaaaatgaatccctgaagtgaacatgagtcaggtactgttctgggcactgaggatggattaggcagtgagattggtcccagtctctgtctccatggaattaacatcctaggggtgaccagccatgaatctcccaatcattaaacaagtggtgatttcagagagtgataagaggtataaagaaaaactcccctctcaaaagattatgacgtttctttcacaagattaaacattacaaatataaaaaaaaaaaaaagaaaaaaaaaaacaacccaagaaatgggatggcgatgccctttggccatgttcactgctgcatatccacacaaacgccttcgtggcagcccaggcagtgcccagcaagctcagactcagccagtcctcgagctggcctggcagggctttgcaatgcagctaccttgtggccagaggggcccatccaagtccagtttctccatgtcagggctagcaatgaggaggatgactgtgcaggcagcccgcccaggcctcagcagggaggggagcggagactccctccgggtggttctctaggcagagctgccagcagggtggacggttccctgaaaggaccactctcttgccctgccaggaagggcatctggggcctttgggaagcactcgtggaaggtgctgggtgcttcacctcgtatctggcggacgccatcacctctgctctacttctagggtgactgctttgaggaagacgtggcaatttcagaagctttttaaacttcccagagcagaaggccaagtttcccaatctaatctatatgccttagcgatgtcactcctggacagggataattttaaatgcaagcatactgatgtagctataggatggggtaaggtaagatgtagggtagaaaccattatcttaaaaaaagagcaacttcagagaaaaaagcagttctaggggcaaacaaaactgtaccagaggggctcctaggaacctcagggactttccatttgatttgccttttcaggtaaaacaccattaataggagccagaatagagtcagaggacaatgtctgtttgtttgtccctacacacacacacacacacacacacacacatacatacaggcacacacagacacacacacaggcacagacacacacaggcacacacacagacacacacacacaggcacacacaggcacacacacagacacacacacagacacacacaggcacacacacacagacacacagagacacacacacagacacacacacaggcgcacacacacacagacacacacaggcacacacacacagacacacagagacacacacacagacacacacaggcgcacacacacagacacacacacacagacacacacacagacacacacacacacatacacagacacacacacagacacacacacacacgggtatgtgactgaggaatgtgacatgaatgacctggcataaatgcaatgttctaatttattccacatcattcactgagattctccactcactaattttcctaaaagcagattttttcatatcctttgaagtcaagcaagtggttttggggaaagggttgttccctccgggccggctggcaacatacggaattgtctcaaaagccccgttagcaacagaggaaaggtcagccccctcttagtgaatggagaaggagaaagtaaaggttgtgatgataaacatagagcaagttttgacaaccattggatcatttaacagtaccagaacatctagacggaaccacatttttttttaccattgctattcatatattttttaagaaaattaaaaaaaaaacttccaagacattttctaaactgggaaggaggataaaatatttacccatggtgtaaactatgtaaaatgcaataatgtgtaagacctggtatttgacagcataacagggtgaccatagtcaataataatttaattgtacattttaaaataactaaaagtataattggattgtttataacacaaagaataaatgctgagaggatggataccccattttccatgacgtgattattgtatattgcatgcctatatcaaaacatctcatgtaccccatacatgagatgtgtataggtacaatgtgtgcataggagtgcagtggtgtgatcacagctccacagctgtgcacctgctatgcgtatacacctactatgcacctaaatgcctaggtacctacatttacgggtactacgtacccgtaaaaattgaaaattaaaaagaaaaataaataaacgaaatgatctattatcttcttctactgatgaggacataatgaagggtttggtatgttagactcatacacatatatgcagacttttgtggttgtagttaaattggtcaatagatatagactgacctaagaaaagaggaattaacttccagcctaatactgactgggcacttctgttcccgtacaccctcagagacttcagccaacttctgaagcagttaattggctttcctggctggaaccgcaacgccattgcaggcaagtgtcttggagctccagacaggcccgtgaacagggtggcaagaagtctaggagaacatgaatcagccccgcatggacacccgtggcatttaagcccgaaaggaaacttgactggtagccgaagtcagcaatggatgccaagcaggctgtgccatgttgggggactgaggggtggggaccggctcctgagcatggctggtggccacggaggccccaccttgtgaggccactatgtcccctttggccctacacatcagactccacccttcccagcagactctctgaccctttcagctctgaccacaaagggtggaacttaatgagctgggaacccaatttctcactggttttggtaaattaaaagcgataaaatgagtaatccattaaagtcatcatttttcctaactgaaaaaaaaaagtatgacaactctgttgagacttgacctctttgaaataaaggctgttactttctgggagctttttttttttttttttttttttgagacaaggtcttgctctgtcacccaggctggagtgcagtggtgtgatcacagctcactgcagccttgacttcctgggcataggtgaccctcctgcctcagcctctcaagtagctgtgactacaggtgtgcgctaccatgctcagctaatttttgtattttttgtagagacagggtttcgccatgttgcccaagctgttctcgaactcctgaactcaagccattcacccgccttggcctcccaaagtgctgggattataggcgtgaaccaccatgcctggcatctggcaggtattctgagatttaaatctttagatactgcagtttactcattgtcctttgttgtcatggagtttatagaaaaggctatttaggaactaatgctgtcttaattattttctctgtctctcctctgcctcttcgaatgtacatgtgtaggtgtatgtgtgtgtatatgtacgtgtttctttttatacttggctttttgtagccatcattttttatcttttagaatgcccccaccacacattcagcatagatttgcttttcagaattttgaacattgagaattctttgaatattttctaatacctgaacatttacctttatatgtctgcagcctgtggacaggtgtgtagaatagcagactgtcagacttgggaggaccatgaggctattgacttggaccttccatctcatcaagcaggaattctcccaaggaaccaccgccctgacctatcccaggggtcaggcctgcctaaaccaggcttgagttttgtatatattgctcagctcagttgtagagctcaggtgtgataactctgcctaagaggggatgaggaggagggctaaatggagggaaaagtggtacaggagagaaaatagagagaaagggacattataagggtgggactggggtcagaggctgggaactgggggctgggggagatctatcagaagagagcaggctgcagggacgtcctcctgggttcctgctgtgtcatgcgtctgaccttttgtgtctctttctcaaaccctgttgatgtgtcagcccacgagatgctgggggtgtggagaggacgaagaccagggcagaatctttggcctaaaaagcagagttcctggaacagtgtcgacattttaaaaatattagctagcttgaagaggaatgctgaactctctctctctctattgttctctcctacttaatttcataactgatctcctcttattgaaactgtaagtggaaaaaaagatggtttcacagagatcctcattaaagaaagtgttgccgtaagtaatctagtaatgtaggcgttctgcagcacaacattcctcctgagcttatcactttacactgtgaggccaagatgttaaaaaaaaatacacacatacacagcaaacccctactcccaaacataagagtttagatcttgagcaataagacatagatactatcacaatattttgcaaatctcagaaacattgccacattttccatagggttaacatctgagatgaaaaactaattcagaacttatgattccttttaaaaaaattcccttagccaaactgaagaaatttactcgggagaagaaaatgacttaacttgtagtttccacaatgagaaacatattctcatggctttcagccactttctatcattatgtgatgggcttaaattgcattcactgacagtgaattaaaagcatgaatgaaatctttaaatgaacaactgaaataaaatcatgatttaaacatcctagcacttaaaagtaaaagaaacttttgcatggctgtagacataatgatcaatactgagttttaatcccaaacctgacagcccatatttttcaaactgagtgcctcaaattcacaataaaaaaaaataggcctcttattgctgcagtgagatagggcagtgtaatgcctatgagtgtgtctcttcctgtgttgtatctggccttgagtccacagaatcccccaacatcaaaggaagcagtaggagatggtgtgtggaacaccagatagccggaggaaaggggaaactcttcctttgccaagagggattgctaaaattagatggtaaagtagtcttggcactggaagtcgtcttgctgacgatcagcttcaatagatgatagaactgttgcttatttggagactttcaaagagaggggcttacaccccaggcaggaacgtcttaccaggctgaagagctctttctgtgtggagatgctttcctaggtctatcttaaattcttcatgctgatattcaaccccacttcctcttgctttggagcttagtgcagaaggggccttgccaggcactattcttttcctgcaaacttcccaagatgattttcataactcaagaccatcatccttctctccccaacacccccaatctgggcgcttcattttggccttttctgtgcatttggggtgcatgtggaaagaaggttctgcaagatggggtggaaggaccaggactgggctctcacttgggctgagcgtatggtcacctggcacatccagggccatctctactctcctcccccatctcccttgcctctgccttgccctggtgacattatctagacatctaccactcaaatgtatgacttgggtaagcattgcatcttctatgtttctcttttaaactttgagaccatcaggaaagggttgagcctgtcaatattaatatctttgctgccctcgtttcctctcaagaaaatatttagggaagcaagaagggctgggagaggggatgaagaggaaaagcagggggcttaggaaaaggggacctgagcaggggccacagagatcagccccattttcctgagaacgtccctgtggcttcctcagagggaccacacaacgtccagagaccaccgtgtgactttcagagataacagcgacagttcctggcaacatttgctccctcccccacctccatccttcatcctcctcctcagagaattttatttggctttgggcaacatgaaagtcaactccacagagtgcagagggagtcagagagcccagtcctcatctcatctggtcagcttcttttttctttttttctttttccttttttttgagatggagtcttgctctgtcacccaggctgtagtgtagtggcccagtctcggctcactgcaagctccgcctcccaggttcacgccattctcctgcctcagcctcccgagtagctgggactacaggcacccgccaccatgcctggctaattttttgtatttttagtagagatggggtttcaccgagttagccaggatggtctcagtctcctgacctcgtgatccgcccgccttgccctcccaaagtgctgggattacaggcgtgagccaccgtgcccggcctcttttttcttaagaccaaaacaaaccacaaacgctctcaccctactaaatatccacccatgaagtacagttgggaaatctgtgctccaaagcaaaaccattctctttgaaggagccagcctagactgctctatcccaccaatgagagagttaatagacttgatgggagacaggcacatggcaataaggaggtctgttcttaggtgaaataggtgagttgtgctggccatcagcactggaagccctgaattcaggcctttgggtgagcagggcagcacacacaactgggcagagtggccctttatctcatgccagctggacccagagccggagcttggaggctggggtgatcaggctgttcttggcagaggttcctgaaatgaaatgactctggtggtgatgggaggccgtggctccaggcctgccccagcataacacgttgttagcatatgttaacaggctgccttttctccaaagatcacaaaatgcattccatttagtgtctgttttggaagtgttgctatctgtgttttataggtgacaaaaccaagatacatcaaggtcatggagcccccacagctgagggtgagtgagttaggggctgacctgggagacctgcgcttcctgattctcaggctgttgctcaacagctgacccctgatctttccaaactccttccagaatggtccttttggcctgcagatctcagggtctggtaggagttaaaaggaacacgtgtgttctgaactccctggaagagagtattgaaaacacacacacaatctagtgttcgacatgtggggaccgagatgaaaggggacagctgtttcagtgctgggttttgtgaccacacgtggttaggccttcagcccacggaaagcacatggaaaatgagtggaagacctggctccctctcttctctcccgttaggcacaagacggtgtaaatcctggtcttcctccttttaaaagtgtgactattgcgtcagactaagctttctaaggaactcgccactggtatcattcaacagaaaggaacctgctagattaaagctaagtgaaattttccaaatgatttcagctggctctacctagtggttaagcttcatctttatcgggctgaacgagatgagctttcacccaagatgttggagccacgcttataatatttgacttttacacaaacagttatttgattgcaatccaaacaaaagcaaatgatgtccaaagttagaactatggatacaaggcactgaaacatcttaaaactcaaggctgaaaggtatctaaggaatttttgtctcaaggaagaggtgttataattcccaaaaaggaaactgtgtctactgatttttttaaatctagagggaagacgatcatataattttctttctttcttttttttttttttttttttttgagacagagtcttgctctgtcacccaggctggaatgcagtggcgcaatctcggctcactgcaaactccgcctcccgggttcacgccattctcctgcctcagcctcctgagtagctgggactacaggcacccaccaccacacctgactaattttttgtatttttagtaaacacggggtttcaccgtgttagccaggatggtctcgatttcctgacctcgtgatctgcccacctcggcctcccaaagtgctgggattacaggcgtgagccaccgcacccagcctcatataattttcatcaggcactaaagcttaacaatcaactggcaaacaaatgtttaccatacacgactgtatgcaaagttccggaagggcaggcagatagctattttattcatgttcccatagttgagtgcttcatgttctttggacttgtataagtaacattaactactcttaatactgggaaattctttgttatctctctcaaccgtctctcacatcattgccttttggtatggcctcctaatctgagttctgttccagggaaaatgggaatggaagtcactctcaatgacagccctgcacacgcagggaacacctggttactagtttgtccctgagccacttcttctggtgccaggctgagctaaggataaggcagcagaaagcaaaaggcaacctcgaatgtctctagatccagacttttggtctttccctccaaatgtcttcctcccatagtcctctatggcaattgcagtttccagatttcttacgctgaagaacatgtgatacttccatgcctgttttcttttgctcgttccctccatctaccagtcatcgactaatgctggttttacctccaaaacagtcactctctttaccgtctctataattttttttacttccatttgcaatagtttcttatttgtattttttaaaagtttttttaatagccttattgagatataattcacatatcatatagttcacctatttcaaatgtacaattcaataagtttttggcctattattttttttgagttatggttttatatatatatatatatatatatatacgcatatataacatacagtttgacattttaagaatttttaactatagttctatggcactaattacattcacaatgttggcaataataattactattcatttttcccaaaactttttaattgcccaaataaagactaaatatgcattaggagtagaagaaaacttcaacacgataaagctcatatatagaaacccacaactaacataataccgaatgataaactactgaaagcttttcccctaagatcaggaacaagacaaggatgttcactcttgccacttctattcaacacagtactggaaattctagccggagcaattaagaaaacaacatataaaagacacccaaattggaaagtaaggagtcaaattatctctttacagatgccatgatattatatgtagaaaactctaaagaatcctgaaataaaaatctgttcgatataataagtgaattctgcaagcttgtagaatatatagaaacacaaagagcagttgtgtttctacatacttgcaatgaccaattcaaaaaggtaactgaaaacaatttcattcaaaataacattgaaaagaacaaaatatgtacaagtaaattttaaacaaggaggcaaaagactcatatactgaaaaccacaaaatattactcaaagaaattaaagaacaaaataaatgaaaaggcacctcatgttcatggattggaagacctgctgttaagataactatactacccaaagcaaactaaagattcagtgtaatcccccatcaaaatcccaatattattattattattattactatttttacagaaataataagacccatcctgaaatgctaactggctttttgcacttgctgtttctccttcctggtgtgctcctgagtcagacattagcatggctcccagtgtcacctccttcaggtgagtatgccacatgacactcatcaccttctcagcgtgcccctccttcaccagctttgcacccccagctgccccttatttgtcttatgcttttccattgcccttagtatcattttcccacacagcacattttatttatttatttatttatttatttatttatttatttatttattatttatttatttatttagagatggtatctcgctctgtcacccaggctggagtgcattggcgtgatcttggctcactgcaacctccacctcccaggctcaagcaatgctcctgcctcagcctcccgagtagctgggactacaggcacacgccaccatgcccagctaatttttgtatttttagtagagacggggtttcaccatattggccaggctggtcttgaactcctaatctcaggtgatccatctgccttgccctcccaaactgctgggattacaggcgtgagccactgtgcccggcctacttatttatttttataatttcccctttaaatacaaatttcacgaggtcaggaagttttatgtttgttcactgctgtatttccagcatctaaaacatgtcaggcacatagcaggcattcaagataaatatttatcaaatgcaagcatgagtgtaaaatgtatgagaaaaaccaatacatccacatttattatttttgtaatgagacaagaccaacaagtgattactaatgggattttcgcctcacattttccttaacagaatttaaaattgtggcaaaacatggtggtgcaagaacaatacaacttcattacacacccaaagaagtggtgagttcatctatttcctcccactcgaaaagcaaattcattttgggctgttttcacatcatcaactctccttccaatgtactgctccttgaatcagaatacatttgaaatcatttcccagtctgaaaaagtcatcagtgtatcttaatccatcttaatctgtaatggcaaaggaccccatgtgagtggagatgcagttatggctaagtgtgggatgccaagaacttgactttggctgggtgagagcaagtctcaatagcaagggagcaagtagacagctggtaggaaaatcatgggttcgcctgcatgtgagtaacaaggacgaacggtaatgggagactcccacaagtgggaaacagtacatgtagacatgactacatgccaaacaaatgtacaattgcacatacttaacttatgatttttactttgatgataatgagtgaacaagaaggagaaaagctgtctttttttttttaaaaaaaaagatgactcaaccatgtcttatattaaatagatattgggaacatttgcctgaattacatcactgacctcatgaagccatgaaatctcccacagaacaccacaaagccacagctttatctccaagctcaacactttgtaatggcacctcttcaaggcttagttcctgtatttccattctcaggggcagatgcttcccttaggaagagaagcccactgtctctctgagaggagaaactgatgcttcttaccctgagactgaaagggctgcagtgcctaaaatgagcactgtgatccaacctggagaaactgtatctttaacacactcacaaagaaaaaaataaaaaagaaaaccatattctttagatttatttcgttcaaatacactctttagctagagcacaggcatttaccttccaattctacttatctattgatccaacatatttacatattttcaaaataatccacacacattctataatcccacccatataagatttctttaaagtggtaaaccttttccaccaccatttactgttgagaaaataaagggatgagaaagcattagctgtgttctagacatggtccagtcaaagaagggagaacttggaaatacagaactgtggttattcatcgtgactctgccagccattgactacttgtgtacacttggaccaagagactggtttgataccagtcacatccatgatggtgacattccatgggatgacaaagtgcctgtggttgtgccagaactttcttgtatcaaataattctagaaaacaagaggcccagaagctagaaccaagacaccacttttgtatgaattaacaagacctcaattgcttggccatagtggctcccatcatggcttctgagttgtagaccttagcattatggcacatctcaagggactatgaaaaatcagctccccatctgtgttccatagaacagcacgacaatttcaggacctagctgagggcgtgtcttgagtaaagtcacagataaagcttacactagaacctgggaactttgatcctgtttttatcaccccgtccattgttgaagtaatcatttaattttcccaaatggtccatggactgtttgaagcaggaccttacctgattctaccccacttctaatgcttctgtacctgaagattttattaaatgacaagggatcatgtatttggggaaacagagacattcaactttcgggctcacaagagaggcagctttaagttcagaccttcccttgttgtctgcttgctggagaagtgtctgtcttgtgatcccagcttacaattggccctggaccacaaaccaggcctacaagaacatggatgtggtgcccatgtttcaaattcatctcactctcttatcagcaggggactttgatttggcttttcctaagacatggttaaaattcttattatcagcttcaatttctgtgccacagttttaagactaaccacctctgcttttctctatccacagcataaaccacaaaaactgctgtcaccactgaattgttgaaagagaaggcataggtagattttattgatgtattcagagatctccagaaatcatgtttttttttttattagagttgaatttcttcttcataccaatatgcttacccaatgtgatggagtgatgaggaaacgggagagatgaagacagagatacagacagagatgagagaggctgcattttactcagtaaagacccccactgaccccacaatttgtctacagtcctataaacaccattaggattctgtatgactcattgtatatgcaaggaaatagcctcttctgtcctctaaagcaccacaattaaattccacacttgagtcaaattggagtcagatcagaccaatggccccaccccataccccacgaataatttaattaataatttagttaatctatactaagaaccttcatattacagcttctctatttttaagcctaggaactatcagttttccagacatactatatgacttaaaagacaggctccacagttccatcctcatccctggcacctaatcataaaggacattcatgatcctagctatcccttagcttccttcttacagctcagactctgctggaccgaccctgatatacctgctcagcactcgccagctagttgccttccctcatgctataaatgctgtacatggaggaagaacatggcttttggctgcagctggaagtctcctcccctccatctcttatcttttaagtaccctttgaatttcatgccagtgtcaggtgagtatggggtggcactattatgtgattttcctgccacatttgcaggtgtgcctcatggccttgacacatttaatgtcactttctttcaactgggatgtgtggcgaccagtacgtccactccagctggaatgcctgggattgtgtttttatggatgacgtcttcacagctgggaagcatctctccagggtctctgacagtgagtaagttgctcacatcattgttggcaggctcatcccaattttaagtcattctctaagacaaggcagacaaaaagtctcatctattaaggtcaccaggcctttgagtgctgaggagctaaactaaagcgttgcatccaggtgctggattgtggagttgttgtatgcattgtctttgagagaaaggctacagtgaaggagatggaggcacccacacgtggaagattggagatttaaacatgaaacagcctcaatgtttttcttgaaaatctgctttgcctccataaaagcctcaaggaggcaaactgaactaaatgtacttttcaggaaacacaatgagaaggacatcatctggttaacacaataaagccacactactctctctccccctctctctctttcaagccttccagagcacccttcctctagcagacatagaagaaaactacccacatggctcagaggttaagggcctgggaacgagcctcaggcagacatggataggagttccattctgctggttgactttgggaaagttaggcaacctctctggatcagaagaggagagcaataataccagtatcctggttgttacataggaagtgctgggcacagcaccgcgcacataaggggtgctcagtacatgctggtcaatattatcgttattaatatttcctttgtctgagtggtgaatgaggagcatggagaagtggtgtcaccacatcttttgatcctggggctcagtggtgctttagagtgggtgaaggctgagcctgaatcaaggcctgcccagagcctttctctaccaggcaaaacgtgctggaaagatagaagagaggagctcctgattcacccaggacagtccccatttactgtacttgccacctccttttccactctgggaagtacccagttaaggaggacaaatgacactgtcaccctctctaggaggtaccttaggtggcttctacagctgcactgcttggtattggtgccaccagccccatgtgggcaagaagcatgtggctgagacagctcgaaagtgtaacctgcacaccagatctcaaagactcgggaaagagaaagagtgtaagctatggcattaataatttttatatagaatgcatattgaaatgtaacatttggctatagtgggttaaaaatattagtaaattaatctcacgtgtttcttttcacttacttgattgtggctacagaacgttcatctgcgggcttgtgttctattctgcggggcagggctgtcctggaggttgagccccatgggcagtggacatgtagctgtgctctggacagacgctgtggctgccaccacattttctctcaggctttgggggaaatgctctcccccagccccaccccagaactgtgccttaatgccctggcccggttgggtctccatccctgcatccctgcagttagccctgctctctaggtgacccgccgtcctttggatgtgctaaagccaccacattcaatatattcagacatgtgccaccacttccccttccctggctccaccctttgtctccctgcagtgtttctcctccaggatagcagcccttttgggtaccagagtccagaccttcatgtcacctcttgctggcctctactccttgctcttcagaagcaagtcatctgccaacccccttggtggcctctctcctacctcttctccactctcactgccaccaccctcgttcaggccctttattttgtgatatttactgtttcaacatcctccaagctgatcagcttacttatcttcctattacccccaaacgccgatgagatccttttataatccagaactatttcatgttccagctttaaaatatgtccctgatcctccctggtacccaagctcttcagcctggcattcacagccctttagaactcagccccattttatggatccaggtttattccctgttatttccattgcctcctcccatctaccccacggccaccacccctgggccatgctatttttcacaaacacatgctgtacctttttagctctcagtgtctgatccatggtgctccttggcaccaatgtcctcttcactccctcatctgctttggggagttccatctaacctgagggctcagttaaaacctgcattctccaaaaactttccctgcccctccccccaacagaattggttcatcttcctacaaccaatggcaatttcatggtggtgccatgtacacattcgagttggcctcatattaggggaatgtatgtgagcatttccattctcatctagaggaggacttctttagtatttggtggttatttcttcacattctgatcctccctcctccatagcaactagcatcaacttccagccaccatttggaaggtgttcaatacgtgagggtgacttgaggcaaagacaagggtcaacctaacacgtctttggaaggatcgatgctcaggcttgtctcagctttgggctgggagaattccttgaggactgatgaggatggggcagaccacagtagcatttaaagagaaaaagggaaaagttaggttgtgcacatctgcataggcagactttctaattttgttacttcagtatatttgctgaatgtgcactgcaagaatatttaaagatcaaagttctatagcagtgagcccagaacatgctcaagcatggttaattctgccactttcaccctcttctccttcatcaccgatatggcagatacctagtggtggactcggtgcttctaaccatactgattatggaatgatcattacagactttgaataaggtaggcttctggaagaagataaaattacacttctattagaacgtcaagtaggaccttgcatgaaaagagccattgatccaaagggaagaaaggtaaagagaagaaaagaaaagaaaaacagcaacaacaaaaaacggagcccaccgactgtaatggagaggttgatgcttggctttaggagagcaggtcgtgtgtgtgttgaattacaggcaattatcagtggtctccctgttggccctgaagaatttagaactgcgtcaaaaggaaatctggtctatcaggagggaggtcctgctgcatcttttaaccctgtgccaactccactgcacttgaaactttccatgatgtatcctattcttaaaatctcacaaatgttgttggtaaaacaactgttagcatttgatgcgaggataaaactctctgctagatcacgtgttcttttaggggcccaaattgggattgtgaaaatgttatatgattttaaagactgaaataaatcctgcccgatgtcttctctgctttctagcagtttatccacaaggaaggaaccaacacttctgcacaaaccccaccgagtgagtgttgttcaccaatataatcttgaggcactacaagcccatgaagtttgggcggattctccaaagaataattacactccggtcaatgcaattttagtgttaattacacattattatattcctgggataagacacacttatatgagcatctcagccacctaagcatgcatcactgaaaaacggagatcaaggtggttcaaaggcttcatggagccaggcctgctagaggacaatgggcacttctcccatttatgcactgtgacctggactggtcagagttggccctgctcattcctcttgccagcccttaagggacaacagggacacaccatgcttctgatttagatggaatgaaggtgactgagtaaaaaatatggaaactaaatacttaaagggtgactctaattttttttcaggagggtttaaaattttgactaaccaaacatggagcttgggcctaatacttcaacatttttgtgctttagttttcttatatgtaaaagatgagcagatgaccatatgccacttgcaagcattaaggtcctatcagttgatgctgaagctgtgttagacaaatcacacgctggtataactaggctggatgaaagtctatcctgagtgttcacacagaactgcatagaaagttgatattggtaatgagggcctaggttagaactgttcagagaaagcacgacgtctgtgacagctgaatattgtgtggcaatattaagttgggttctgtttcatctctggctataaggcatacaaaaccatattgcatattttggtttcaaggtgtttttttttcctccctaaatttataccaatagcaaggcattattactccataagctccaaaaacattatttttaaaaacatatccaatatagatttggggtagtaacaacaactgctaggaatttaatccatcaattacactcctttttttaaaaaaaaatctggtcttctgccttaatgtttaaatatgcagaggttcaaagcacctgacaattaggtgctctgtgccttcttaccagacacttcacattaagacatgtcctttgttgacgagaatgtttttgcctggctgtctgttgcatttctctctctcttcctagcttctgtgatgctacttggtagagagtgatgtttaataatagtttgttaaatgaatcaacaggtaaacataaaatatggtcagtcacactaccgtgagtacacacacacgcacacacacacacacacacacacacactcattcacaaagtcctacacaggaaactaccccaggccattcccatttagaaaaaaatgtgcaactcgctgccagcactcatgtaattttacataaacacactcgttgaggctgaagaaaatctctctgattttcaatgtgaaaataaaatctaaaaactgtttttggagttatttccaaacagaactatcattagaatcatctgaaacatcagaatcatctattctggaaaaatcggattcatcaaatgcatctttagccaacaactgttcgagaatgatgtgaacatcacaggtaggaatgctatgttttctagaattcacattttcagtgactgagaattactatattttgtaagtgaagataccactaccaaaatcaaaatgctataaatagaatgatatcttttgtttccagagtcgatttgctagtaggttggtgcagaaataattccggtttttgccattaaaagtgatgtgaataacaatgaaagtgagatatttcatggcaaagttaactggggataaatggtgcacctgcaagcactgctggtgagtattcttgggacaaacagggaaagggttaagtagttcaggaatagtgaagatgcttcaccttctcaggccttttcctgatcccaagcccatgacacacatgacaattgatccaggcaactttcctaccgagactccttctcaagccccagctccggggcagtgagacagccactactaattcataagagttgtcacttgggataaagtaaaggttccatccctggaatagacatggctctttgctgtcaactcatatgttaatgtctggggatcaggtggatccctccgtgggttgaaacagaaaagaacttaaaacaacttggcattatccataggaaaccgaggagggtaagcaataaatctacattaataaaaaaatgccaggaggggtttcagcgccctccatggccactgcctgtggacaagagctctgctgactgtcaagtggaattgatcccatccatgtttcatcacttcaacagcgagtggaagcagaagagcatttatcatcatgaaacagacaagaattcttgctaattaccattttgttttaaagtatagtaagatttagggcaccctcgctaccccaactagcttctttccttgacttttatgtgggcagtgttgttataatttctctgttcaaataaagtctgtagaaagccacaaaaagagatctggaccctaaagcttaacggattctggaaagcagctggcttgtaacatgagtcattccagccaaagctttctcttttgtatgtttttctctgacctaaagagtgggttattggatgtcttctggcaggtgctacaggattaagaaggtagctggtcagaaacaaactttgaattagggggattttttaaaaaatagttgactaaagtaaatatgatcgttagcttaatcctccatatctaacgtgagattcaaatttaataggcaagtttaaaaatcggctggcatgtgcatctattatttgtgtatgtgtctggatgccttgctccaagagtacaggttagttgtccgtgatgaaatttccaagaccttcctgtttatcaggcccagcagtccaaaagcccaaatacccacatgacctccttttctaggattatgagagaaaaacaagtagaatattaataaattacagtgggaaattattcttttgttaaagtcacttttacaaagtttgtaggggattccagactatttctcacatctataattctgagccatgataaattaatagatttttgtataactctcagatatttctgaagatgcttcaggtttctgaatcattaaggcaagatcgacttgaatggtatccacttttagaggtggcgactctctcttaatgaacaaaatacttggattaataaaaattagtgacccacaggtttgacatctatatggacatatgacataggacatatgtccacatctatatggacatatgacaaaatctctgagcatgactttggacaataatttaaccttgaagagattcatttacacatctatacattgagatgaatgattacacttgctgtcacagcatggtaaagagaaaggaaagtgttctcggtgaaaaccctttagatactctaaagtagagtagaaatcaggcgtcagaaaacttttatggtaaaatgtcagacaataaatattttaggctttgtgcataaggtttttatcaaaactactcaactctgtcacagcaagaaagcagccatcgataatacataaatgaacgggcatgactgtattccaataaggcattatttacaaaatcaggctcaggccagatttggcccacggacttcagtttgctgagccctgatttaaacactagttcttgcgatgactgaacaacgtgaacgtccatgttatcgcatgtatacaaacatactatcccaatatgaatacacacatctacatcatttaccttctttaaaaatgtcctgccttttgtaagccattggtacctgtaagtaaataacattatattgggggtctatagatttagttgaattttcacccttgccttgcagcaaagaaaaaaagtctgaggcaacacatttgacagttggcccttgcatattataaaatctaatctaaatgagaccaacacataagcacctttatacatataaatctagtttataactgaatatcaactgagtttattcattatttgcttttcacagctctgcagacaggaagaaatggctaccagaataacagcaactctgagaagttattacgagaggtgaaggttattgcaaagttgagtttattaaagaccctcatccccaaattggagagaagttacaatgaaaaaaaataataaaacaaagtggagataatgtccagtgatgataagagtggaggcaaaatagccaccgtcatgcactgtggggtggaatataagttggcacagcctttccagaaagggcaatgtgtccgtaccaaaactcttaaaaatccttgtagcctttgaaacagatgtctatttctaggaacttatcctaaggcagtaatcagaaatgcacccaaagattatgttcagagatgttcattgcaacattattatactgaaacattagaaacaatctaaattatcaacaatttaaggccatttaagtaaactactgtgttatagaaattcatgcaaaaattaaggtgatattttagaagaatttttaatgaataaaatatattcattcataacattttaaaagagacaaaagtagtttacaaagcagcactttgagtatgatgccaaataaaaatacattttaacattatggaaaaaaggacatcaaatgataacaggagacctggaataattactaggattatgggtcatgttaacttctttaaacatgtctgatgttttaaggttgctccaatgaacttttgaaataagacaaaagtacacataattttaaaaattaatatcttagttatcttagttaaccagaatcagctgtactttaattaattggattttttaaggaaatggacaatttcagctggtatctaagggtccagttttcatgttgcgtgccatacataatcagtctaatatttcaatctcctgcagcaactgaattaaacaatgaaacatcctgcctaggtgtatagttgttcaggtgaggagtagtggcatagacacacttgattaggaatctggtgactttccttctagtccaggatcgatacttagtcatctctagccttgggcacatttcataacgcatgagtctcagtttccacatatacggaaaggagataaacatccgggctcagcttatctccaaagagttcctgggaaggtcaagcatgatatggctttctccttatcagtggttctgaaaacccagaaccataacatgttaagccaggggagccagtagaaaccactgccccatagtttttacaatgtgtgcttttggtaacagcaacccatgttagcaaatcggagcttcctccatgggcactgccagggcgtcctcagagctctgctttccagccacagacggggctgagccctctctgccgaggcagccgtttactcttgtgtgccatggagccctcagctccctgtaaacatccatcacagcactcactgctgcactattgcgacttctctgttcgtctcccttggcagcacatggtgatgctctgatcagagcctggtcttccctccctgggtttcccacaaggtctggatagcagagcatatgctgcacagcccacacagctgtcctggtaggaactgaggaaacaaggaagggagtgcactcaactcttgacagatttggagaagagggagagaaaacagctgatggagaagaggcagcaacgtggagtgaataagcgcggagatgctgaagtcaaactgcccaggttcattcaccagctctgccttttcctggctgtgagatcctgggcacgttcctaaatccctttgcatttcaacttccacacctgtgacgtggggatcataatcctacctaactcagagggttgctgtgagggttaaacttggtaatatatgggaagtgcttagaatagacaccacataataattaataattcttcttcttgttgttgctaggggaagccaaggcaggatatttaggtgttagctttcttccccttgtttttggtatgagaagctcttgagcatatttaggagacaagagaatgtttaccatgggataatgggtttggaaggatgaaggctgctttatcacagaaggtgctttatggtaaaagaaactcgtcctactcgccaataatgagatacaatgatgccagtggtggaagaggtggtggctgaggtgcgaacatcaaacacagccactcataacaagtactagaaaactcatctcaggctttgatcatgcgaaagtcaatggcctactaggcatacttagtgatcacataggaaggaggaagcaaaggagcatctgttgagtgcttactgtgttccaggccctggactagaagagaacttgacttgcatcatctcccactaacttcacaagaactctatggagtaagcgttgtccctgttttacagacaacaaaactgagattcagagaggtggacaggtcactcaaggtcaagagctagttaatgacagggcagagagttaagcctcagtctttatgactccagtgtacaagttgtcctgcaccacactctgcagcccagtagcaattacagaaattatcaaatgtgtattgggtgacctttgttgtgagtttcatttcattatgatagtatacttgatacatgttattttaggcttcagaactactcaagtagcctggtcacctaataacagctttggaaaacgctgaagagtccatcaatgggaaagagaccaaatggggatgctgggcataatggaaacaatgcttgttttgcagttttgcctaagacaggccttggatatggttagctatatttccactgctgtttctctgcaacccaacatgccattgtcttcagtgctctctgcttcccttgcgcgtggggtgtgactgcaaggtgaagtggctgatctagaacaaaggttgcaggacatacacagcttcttgtagacagcttctctcctaaagagcactggtgagtcagttgtttggggcttgagtaaagctttctattaaaataaagttacagtgggaataaggcttatggaatagcccaggcccattggagtttgttttgcccaccatacgccagctgcagaagtaattggagatctgggtcctaagatgagggactgcatattggaggaggaagaagcagcatcctctccctttcttaaactcaggcaaattataaaataggtacagttcaattccctcatcctgctccttcttctgcctgaggggacagaacagccttaatctgtcctgacccatggtccaggggctagtgtagtcatttgataccccatttctggggcctgaagggtccaggtataaagggaccaagacaggaatgctggggacctcttagcacttgccccaggcccccttccatccagggctgtttcatgtccttcccatccaagaggctctacattagcctactgaagagcctgttgtatcagaatccgtagaatctctgggacttgcagtgtgtgcacattgtgtgtgtgtgtgtgtgtgtgtagctgatacagagtagccaaggcctaggggtgggtggcaggcagagaagctcataaagtgcagagtaagggcccaaagagcagtaatgggaagggggtgagggtttaaatggaaaagaggcaaaaatgggagggggtgggaaggagtgggtggagctggcctccctcagaatcaagctgggctcacttgtgatttaggaggtatgaagtggggaatcagtctttgtctaccttctgttccctgcacccagacctcctccactttcttagggtaagaaatgcctttgataggggtaaagcctttctttccagagtttgagatcagagacttcaatatgcaaagtcttggggtatgctgacagatcagcacacgtgctttttatatttaaataattctcacaacctatgtggcttgtcaggaatgaagaatctaaagcttattgtgctaggggagctccgagtgaacaaagggtgccgaaaggagagtggggggacaattgcatcatcaatttgcagatgtcagaatgtcacattttggttagggatcaggctcattttacacacgcctaagcaactggaaaacatgagagagtattggggccagttgtgataggggccaaggagactgaaatgaggacacctgaggtctacttttcaggctatctggtgtgactttggataagttatttcacctccgtgggccagaaggtgctgatctatcaaatgagcagggaacgtgggaactctaagtttgccctgctatgaatcactctgggtctatgttttgggggactgagcactggggagtctgtgttagccatctttcttctcatagttctgtgttctccagtgggcttttatcatagccgtcttcaggaaaggagctgcagggcattcacccgggtgcaaaggaccagcagtccttccagagaaagaagtaaagtctttagctaaagaacaaagatttaacggtggaactgtccacttgaattggaagggctggtagctttgggtccagcaagggcaccccagatattaaatcaatgaataatatggagagtatagtatattgttactggctgaattgtgcccataccccaaaatttatatttcctgtttttgtttgtttgtttgttttttgagatggagtctcactctgttacccaggctggagtgcactggtgcaatcttggctcacgtcaacctccacctccctggttcacgccattctcctgcctcagcctctggagtagctgggactacaggcacatgccaccatgtccagataatttttgcatttttagtatttttagggtttcatcatgttggccagactggtctcaaactcctcacctcaagtgatctgcctgtctcggcctcccaaagtgctgggattataggcataagtcactgcgcctggccccaaattcatatttccaaggcccagcccctagtatctcaaaaggtgaacctggaacagatccttccctcatggctgtcagaaggaaccaaccctgccaacactttgatcccagacttccagtctccagaattgggagaaaataaatttctgttgcttgagtcctccagtcggtggtactttgcagcctgagcggacgaatgcatatatcttacaaacctttcataagaaatctttcctctgtaggcccaagtaatttgatttcttagtgtgatctgatatcgtttgaattatcacttaacttgggggaattaaataaggcactctggacatacgcagcccctcaggaacacagcttggtgagtggatgatccttttgtttgaaaaaggtgccccttcctctacgcagtcacacctcaccctgggacccttgatttggcaagcagagccaaggctggatttcacctcccacagtccccctcagtggggtgcctttgtacagtgtccaacctgcccaacgatctgcagtgaacctgcatgagatcaggaacccctcaggaatagggattatcttaatctttttggaggcctaagacttagcttggggctgactctccaagcaccctcagccaacgttagttgttcgaacaaaggcagcttggttttctttgggggttgaagggaaacagggaataatttcaccacactttcagctcaaaagtctccataggtctctactgccttcaggaggaagtcttaccatctggcttagattggcctgggctaacctgaactggtcaaccatcccatcattaccttctaacactgcatccccttcatttgaagtgatccactcatcgtcctcaaccacacctggcacttcctgccttgcaggtgctgctttcttctcctggatacctttccctgttctcctttaacagcaaaatcctaagttgacctgagtcctctgtaatggctcgagacaccttctagccttccagtcgtctgaatggctatggtattactgcatgccctgcttagtcctgtgcagtttaagattctccccacctattccacaggtatatgtcttctgtcctcaaactgctgggagacaaagatacatagctttcttttatgtctgtaagaggcctggcataatactgccagtgcactgagcaagttagcaacaacctcatagaaaatgctaatgctgaaaaaattaaaataattcaatgattatctatattcggacaaagcattctggaatcacagcaagaaaatgtggcaaacctccttgagcccttgagcctctgcacctcacacaggatcacacccacaccccccagaaagctgaataagacctatgcaaacaaccttccagggaagggatcgacaaccacaatcagccttctgcctagttaatcataaacccaaacctgccgaagccaagtccatcgccagaacaaggggacaattagcattgccctttgcacacagctactcactgggaaaatcgtgcactgatcagtgcacgcggcttcaactttctcctgaccccagaagattctagcgaagggctgcttggttatagaaatagaaagcccttatcaggaagctgtcaatttcatgacaaacttggtatcggggaagcagataatgggctgtttacatagtcttaggcggaccaggattcatcttgggtcttagggtttcccaattccagatatttcaaatatggaaaacagcaaaacaagtcaaaatgatttaatactgtatatatagcaataaaaaaactgaaaaagtattattttctaaatctttaagagttgcaattagattttttttttaaccaaaatagcacaactgttccccttctctatagaaagttttcattagttcctccccgaccttactttccagaggacctggtaataaacaaaagaatgatcccttgagcatttttcatcatagcatcatgcttttaatggagcagagatgaatcctgggctgctgtgacccacgggtagaaaacacagtgcttctgtgtttgggtttgatcaccctcatggagaaagtggctcctgaagacagatgtaattagttctaatgtctgaggcctttggggatgttcctaaggctttttattgagaaggcaaagcaagcagaggtgagatctgggaggataaagtagaaggcaatgagacccgaaagagtttggcttatgcaaaggaatttccatgagcacccacaaacattggtccaggtactctcttagtcactgtcccctcgaggatggggaagaggaagctgccaacgtcacctggctgctgcatcgacttcctcctcttgccccatcatccatctcagttttagatttaagccaggactgattctctgtggtctaggctgatgtgcaagtgagaatcttgattagaaaacccccaaataactaaataaatgaagtctgttgcttgtttaatgcctttaaatagtgtctcatttataaaatgtatttacaacctttaaaagtacactttgcttctatggggacttatggaacgttctgacctaagtccttgtcagtagctttgagaaggggaatgaggtccccacaaagaatctggggcttcccatcatctccacttaccttcaggctggctggctgaggcacttgggtaatgactttggggagacaataacatgtttagctttagtcttttctcaagagaaaattccatcttggcagtgtccaccagggatactctgtccctaggttttggagtatgctcattccccatgactggcaaagtaaaattgaaccatggagccagaaagtctgagtcagtctgagtcaggccctgtaaccctgcacaccaatctgtttctcagtttcccatccgcaaaatggggtgaatagctgtatctactatgtaaagattgttctgaggattacatgagttattatctgcaaagcacctagaacaattcctggcacatagcgagcgagcactgtctaagtgtttatgaactaactaaataaatggtcttaactttctaggtgctgatttttttctctatcagggaaaatgtttctgtgtgctatttgtggaataagcaataatgatagaagctccaaacatagtcacttaaatacactatgagcactatgcgtgtgcacatacacataatatataaatacactgagctaaacattactatcttccccatgtcaagctctgaagcaactgagaaataaacccctgaaatcaaatgaagaagtaaataccagcattttgcttgtagagttgagttggagaaagagcccatctggggtttcttccagagcatgagaagtacctgcagggacctacccagccagccacaggggcctgcgctgacctcatctctgctgagccctgagatcaggacatagctggggtgggagcgggccctgcctcaggcctcatccagggagacagaggcagaggagaatgcaccatatcaggcaggctgtccccagaaggcctctctcaatctctcccattggatgtgcctctcctctcataaggcggaagaaggcagaggcagatagaagctcagagctcttctctcaatgcttccaaaagggtaggagttcccatttaagaggctggcaagaactccaggagcaggcgagaatgatccccaagacacatatcaatgtgaaatacatgtgtttatattgtgaaacagtcaactccagcttcagaagcagtttgctggggatcattgtcccctccagactgaacacgggctaacatgtagctgagagcgggtgtagacaatagtcttgaaggagctgattggcggttccgtggtttaccagcagcaccgggcaaaggaatgtggcttacctttgaacagacgaaagagggtggaagcgtctgcaccaggtgtgtgcaggcaagggcatgttgagagataggctgggtggtaaagagaggttccttctcggtcttactcttgatggagtccgctggttttctagcctgcgccccgcaggagtgcctgaagggtgtctggtatcagtaatctcctatccctaaaccagcaggagctggggaacatttaacaaccagctcttcaggataaacagctttgacttataacatgtgcagatttcagcaatcactgctgatcactatagttcctctcacagcaacactctatgttagagcatttccaccatttagagataagaaacaagtgcatatagatctttgtaaactgcaataaaataataaggcagaggctgggcgctgtagctcaggcctgtaatcccagcactttgggaggctgaggcgggcggatcatctgaggtcaggaattcgagaccagcccagccaacatggtgagatcccatctctactaaaagtacaaaagctagtggggtgtggtggcgggtgcccgtaatcccggctactcaggaagctgaggcaggagaattgcttgaacccaggaggtggaggttgcagtgagccgagatcgcgccagtgcactccagtctgggcaacatgaatgatactctgtttgaataataataataataataataataaggcggagattattttttagtgattttgacctttttttttttgagacaaggtcttgctctgttgcccaggttggagtacagtagcatgattacggctcactgcagcctcagtctccagggccagtgatctttcagcctcagcctcttcagtagctaggactacaggtgtatgccaccattcctggaaaatttttgtacttttttgtagagacagggttttgccatgttgcccagtctggtctcaaactcctgggctcaagtgaccagcccaccttggcctcccaaagtgctgggattacaggtgtgagccaccacacctggcctttgtttaactcttaagtttgcataatttaattttgcatgatgtctttgtttaactgccagcctgcaaaactccggaaaattaacaatcaagtcttgtgagatgatgcaaacagaaactactcgaagcccatatgtcattgctgtaggaaaagcaggcagattttcacctgcaagcatttcccttctcctctgtcactctctccctgtcccaggtgggtgggtggatcagactgaggctgcagctcatggcagggggctggactgtggatgactgtctcctccctagccgggaggccagaggcactcaggtggttcaagttgacctgcggggctagcagggcagagtagggcttccctgcactttggtctccagccctgcctcattgaggccaatggtttgctttctctcctggctagtctccagctgtgaatgcatctggataaagacaggactggagcctgagggtgggaaatgaaaggggggcacaggaatccagtcaacattgcctgatttacaggagtgacggctcacaagtgggtacacaattgaggatgggtggaagtgagaataaggagagcatctgtgggtaccagttttatggtgtcacagacttcttttgtaaaaataataaacacataaattaaatattaggtgaaatatattttattatatatgtgtgtattaaattattatatattttactatatttatatagtttacatatatactatatactaattataaatatatatcaacatattaaataaatacaaatcaataaacaaataaatatttagcctggcacatatctgcacagcaaaagactgtatttcccagcctactttacagctaggtgcctccatatgtttgtttacgttctggtcaatgatttgtcagcaggagtgtctgggcaaatttcagatcctgctcttcaagggaaagagtagatcttccccttccatattctctcttgctgctggctggaatgtggatgtgatgttgggggctggagcacccattttgagccatgaggtaaatgccaggcattgcagaaggcagcccatcagggtagcagaaacctggttctttgtgattgtgaagatgccatgccaatctactgagacttctacaagagagagaaacacacttctatcttgtttaagccctgataatttggaatctctctctcatagcaacctaaccaataccctaatacaacacaatgtctttatgtgtgtgctattagtaatcagagcatgtctgtggtaaaagtagacctctgggcattcttcaaaagacttagaactgacttttaactcactttctgcatcccatccttttaacttctcagaaagtgaggatcagttatatagttaggttcctgccctgaaagtactacagtatgacagcaccaggcttttattttctttttaactaggtgtgactaatttggagattactttttaaacatacacctaagatgttgtagctaatactgcctcttccatcctagtcactttgcaacttgacattcttttctagtgatgatgaaattctcagcatccagttagaattcatacaatggtgcatatgctttagaatagcctcaatgtctggaatataagtgatgggtctgatttttagaaacagccagaaggcatttaagatcaagactggtgacaaataaggtgaccaaggaagcttgacaatacctgtcttgttcaaaaatgaggtgtgatttaaaagtaaggaggatttacttgtttagccaataaactaactctgaaagtcatttcaaaaaagcagatccgaagatgtttaaagtaataatggtgctgttagaatggtgctccctctccctcccaggggatgactttgaaggacactacaataacagatgtgtaaattctgaaatatatggctaaaatgaggtttattattttctagtcaccacttagacatcttttagtcatttgtttatgacagtttataaatgagaaagaagtccatttaaaatatctccatgaggacctcaaggtaaataataggaatcgatcattcatcaatctggcctggccccggcccactgaagaaagttccttcttgagtgcattcaaagctctcatggtccagccctgttcaacctgagcagcatcctatctgctcctcccccagacgttccgatgccctgcaccagattcaagagagagccaagttccccaacaggctatgcacgtggctattaacacccagcacacgctatccctggccagctctctccttcttccctaagaattaaacattctttggcctgagttttcctcctttatgtcaccataaagttgagttattcattattagggtctatacatgagtagccaaaatatacgggtctctatatttaggtcaaggggccttcagcaggagaacatgaataattaggagtgaggccatgagacagaggaagaaaagctcataggaatgggaagacagcctctcagatgagaggtgtgcggagtgattgctgtgaggaattgctcaataggaaagttagccaacctgaggacgtttctaggggaggaaaagggaaactcatatggttctctgctaattcttaaaaataaggtagattcttactcatctagggtgcttgctcgttatgaacacaggaagattaaggaatgagtatggactgtttctactctatgttttcggacaagaagaataataaaaaagcactgggtagctggaacaactgcagaggccccaacaatgatggagactttctggtgcaccgtggcacaggggtctcttccaaagggactcaatcaaccccaacaggcatcatcttctgtgactcaagatgtcctttttaggagtgcttgtactttttaatgctcagagaagttcgtattactgattcgggaacactgagtttttcagctcctgtaaaactattttcaggtttattttcaagtacattctttacctcggggggtcaaatcttttggtttccagtgaatatcgtggttatacctgtggttacccactgacttctcatctgcctagcttatctgataacaggcaaatggggaaagaggctttaatacccctcaaaaggggaagattgataattagttattcaccgcatagaatcaggccaggtcaactctctccaagaagaaaagcaatctggatattgcactttggggtcccttttcattttggcattacaggcctcatgaggatgtagtctttctgtatttctttctttctttttaaattgttatttatttatttattttaaccaggtcaaagcattacatactgcagaagagaaagcaacttcagcttctcttaaacggtgtcattttcatgacagctcgtaaattttggcctcctatgggtccaggatctgcgcgcatccgcccggggacttgttggtggatccatccctcatggcggagcagcaaggggatcctttagaaaaagcaatgggcgaagtaactgaaagagcgacgcagaaagcaacagccagaaacggcggggacgcgagcggcccagacaggaagggaggcggtggcgcagctctggtgcgcagcgcgccgcagcgacggaacttctgcaaaagctgcctgcccgcgcgttatcagcggcgcgcaggcctgtggttttctcgctctcgcaaccctgctttaactgccggtttatttttcgacaaacaggatgcctccatctgaggctgtcagcatcccaggctctttgaaagaaaagaagtagagcggccccaccctagaggcaaggacggggtctgtgtcaagaggcttcccagagaagtgaaaactctgcaggtgcagccgctgggagagcatcaagaagggcagggtggaggggcagggggcgaagggagggggtgaagcccgcaccctacccccacatgaaactgattccactaccccatctctgcaagcgtccagaggcagagaggccaacatttcggggacagcttggaggcgggagatttaggcagggctccttaaacttttatgtgcatgaaaatcaggccaatcacggggctcttgagcaaatggggacgatgattcagcaggtctgggctgaggcctcagattctgcacttctaacaagttcccaggtggtagtgatgctgccagtccaaagaccacactgtgaatagcaaggcgtcgtcgggacagtctgctttagagtaaaacctaatagatgtgcaaatatttaaaccaagctgtatttattcctgaggccctggtttaactggagccaccttgctaatggaaaatggaaaatgaaattcctttaggttccaaagggaaggaaagtttgaaatggttaaggtatttaaaaaatcctagttgggagtggccttggggattcgggagagttgaagttaggttctgagccaagagatgggggaggaagggtgggatgtggcaaataaatataaacacacacacacaaaccccagcccaaccacaggttctttcctatcaatgaaacatttgcatcttgcaggtagaactcacacgtgtccacatttttcagaagttgaatggttttgtgtaatggtacagaatttggagcccatatttgaatattctagatccaatgttatctcagactggctttaggatcttgtggcctacatttaaaaatgcatgtttctgagtcatgtttaattagtagtagtatctgagaactgagagactagactaagaaatccatggtatatgaataaaatctccagacagcagctagaacatagaggtccctccagaggcagtgccagttgtcagctgtaaaaataggttctgctcagttttgcttaggcctgaagtttcctgaagatttcatttagacttcatcaaaaccagtcaaagacttcctgttacagaaaggttcttaaagtatggctgggactacagggctattaagatgcagattcttgggcctctctgcctcactcatcatggtttctcagggtgggtgccgggaacctgcattttaacaaacgctttgaggattcttatgtactgccaagtttaggagtccctggtctgcaggtttaagttcaaccttctcactgcagcattcaaagacctggcttcaattttgctgttcacaggcgagcctcagtgacttcctcactgccctctgagcactcctggagccacctggctgcctcattcatttcttctcctctgtctttccccagccctggaataaaatgacttccatcttcctctccgaactctcttcagatcatggcttcccactcagcaagcagttactttcctggtctgccactgctgtggtattaatgataggccactcgattctcattttgttgactgaatatttctcatgcttaggctttgcctccctgaccagacagtaagttctctgaagccatttcatgctatataatctttatgttcaagactactttctaacgcagtgtcatgtccacatggatcattcagtaaatttaccgatggcttatctatcaccaacatgttttacagagtgttattaagcagggacactctctatgggtctaggatcagaagaagctgggaagagaaatggggtagtggtgagagtgtcatgagaatctggttatacagtcatcaaagacacagaggaagtgggaaaaagggagtgtagacccctagctcatctgtctgcagtgtgaattggagaggggttcctttttgtttaatatagttaattttccacttgaaatcaaggtcaccaaacctatgagccaaacgatggatgcttgcccttcacactcactgcctagtgatggagctcttggtggcctctctccaccatctctgctccaccatctcttccactctggctggcttcccttcttcctttctgcctgatgggttgtcaactcaaatgcccaactccaagctcaagttaaaggaaatttcaagtgtattacatataatgaagcagactgaaagaacagtagtatactagtaagttagcttaacatggtttagtggaaagcagccaatacacctcagttctgatcctaacacagctagcatcattggccgtgtcaccttggttttcttctttagcctttctgagcttcaaaatttttgttatctaaactctgagcctcagtgttttcattaacagagccagcataacaatgttggcttctaaggcattgggcaggtgagtggggtagttatggagaccacctgagagagcctggaacacggttggtgctggcaacctacagggccccagcccttggcgaggtatctttctggagaaatgcttcctagtgttcctagccattccttgcctcaggcaccttcactaccatcccaatcacaggcctactgctcttcctggtccagcttgctggtcctagtgcttagcttctctcttaaggggatcttttgacctctgtaggaatttcttccgtcttgggcttctggcatggttctattggtcacctggcaccctcctcaccacttcagtggtgcccccaactctgcttctaggactctggcaagtcctacaaccacgatcctggtaatagtacgaggttggatttgtcaaccttgtcacgatcacatttctgttctgcgcattgtgggctgtttggtagcatctttggcatctgcctactggatgttagtacagtcccctctatcccttgagttgtgacaactagaaatgtctccagacagtgccaaatgacccccttcctcctcacactgcctccttcttccaggtaaaaaccactggtgaggccgggtgcggtggctcacgcctgtaatccaagcactttgggaggccaaggcgggtggatcacgaggttaggagatcgagactatcctggctaacacggtgaaaccatgtctctactaaaaatacaaaaaattagccgggcatggcggtgtgcacctgtaatcccagccactcaggaggctgaggcaggaggatggcgtgaacctgggaggcagagcttgcagtgagtcgagatcgtgccactgcactccagcctgagtgacagagtgagactctgtctcaaaaaaaaataaaaaataaaaaaaccactggtgtaagatattttaaggtgacaagcatggagaagaagagaaaagtaatgaggaaaaactaaactggcaagatcaataaatatggtctaaataaatgaaaaaggagattgactaaatagacccatgggaaatgaaaccaggagataaaatgttaaagaaaagtataaaaattgcaaagataagagggcattagatcggctcaaaatggattaaagacttaaacctaaaacctgaaactataaaactactggaagaaaacacaggggagaggcttcttgccattggtctgggcaaagatttttttgaatatgatctcaaagcatacgcaacaaaagcaacagtagacaactaggatggcttcaaaataaaaagcttttgcacagaaaaggaaacattcaacagaataaagacaaaacctacagaaagggaaagaatactggcaaatcatagcatttgataaggtattaatttccaaactacataaagaactcaaacaactcaatagcaaggaaataaataatgtgatttaaaaactgggcaaaggacctgaaaaaaacatttctcagaaaaaggtacacacatgtccagtaagtataaaaaatactcaacatcactcctcatcatgcaaattaaaaccacagtgagctatcacctcacacctggtaggaaagcttttatcaaaaagttaagagatggccgggtgcggtggctcacgcctgtaatcccagcactttgggtggccatggcaggcagatcacctgaggtcaggagttcgagaccagcctgaccaacatggagagaccctgtctctactaaaaatacaaaattagctgggcatggtggcgcacacctgtaatcccagctactcgggaggctgaggcaagagaattgcttgaacctaagaggcagacgttgcggtgagccgagatcgtgccactgcactccagcctgggcaacaagaacgaaactccgtctcaaaaaaatagaaaaatcaagagataacaagtattggtgaggttgtggagaaagggagctcttgcacactcttggtgggaagccattatggaaaactgtatggaggttccccccaaaattaaaaatagactaccctatgatccagaaatcttatttcttgattttttggtatatatccaaaggaaatgaagtcagtatgtcgaagagatatctgcactgtcatgttcatagtggtactattcataataaccaagataaagaatcagcctaagtgtccatcgacagatgaatgaataaagaaactgtgatgaatatatacacaatggagtactattaagccttaaaaaagatagaaaccctgtcatttgcagcaacatggatgaacttggagtacattacactaaataaaataaggcaggcatagaagaacaaacactgcatcatcttatgtatatgtggaatcctaaaaagttaaatctaaaaagactgtacattaaaggtacctaccattgttatctgtctatggaaatattttttaaaaagaagttatttattttggtggaggatccactaaggaacattcctgaatggaacaaagaatgaacctcaacacagatggaatctgtcttagatgtggatgtggctatgggcacagatgggtgcttctaagtgactgcaggccaagcctggctgagaagcatttgggtacagaggggcttttggggaatgatcaggggtgatcaggagcaccagctcctacagattgtttgacacatgccacaagccttgaaatggaaaaggaacacacatatgtcatatcacctctcaacatttcactgaaggagattttcccctaaatagaaagatatggagaaagagtactgagaataatgggctggataagtgggacaatccttgcccttactgaccttcctgaagtgtcgctgaaataggtggacttagaactgaatggaatctactctaagttatttagcaaacctcttctgttatcccactagttaccttttttgaagaggaaaaataagagttgagtttttccattaagaaagtctatttaagctgataaagtggaaaagagggcatcctttctgttctttgattgatgtcctgtaaataacccaatgggaaacggaccagactttatgatcagtcccgtgactatgaatcctcttggtcatagacatttgttttctacacaggtattcaatttaaagcctgagccaatcagctcatgggcagtaagatgtcccttgactgtggtgtttctcacatgcttctccttgcacacttgtccagcttcccacaagggacacctacatgacttccagcctggcacctctggacagaattggaaccacctccatgttgcctgctcctctctgctctaatattcccacatacagcttcttacccttagctgatcacaggaattaaggggaaccaagtttgggtggaaatcccagttacttacttcctgctgtggttgtatgtgagaggagatcagtgtggcctcttctgcttacatccactgatgtttttacacttaagccataagcacaggactggtgaagctccctccatccattggtccatctatctgtctatccatccatctatccatccatccctctatcattcatccatccatctatccattcattcaactatctatccatctacctgcctatccatccattcatttccattcatccttctatctatccatcaatttgtccatctgtccatctgctggctcattcattcattcattcaactatctgtccatccatgcatttgcctattcatctatccatccaacatttcttgagtgcccaaattctgccagtttctgtttttggagaggtaagtgacatatgagccatctctcaaattgctcagagtctctgaaagaacacactcataaacagaaaagctggaattatgttttggtaagagcaaataaaccagagcaagaagaagaatgtgatcctttgcacgagctaccaatgagcatcctagaagacatggtcatcagagtgtcagcctggaagtattactgcttcagggagcaaacgcagatggagtgtgtccatccatgtctgtgatggggatgtgggattcctgttctctgtccctctaacacctcatgcagacacatgtcccaactctcataacctgtgcaatgacttctcttgctgaacaacagccctgtcaggtgcctttaatgactactaccagaaatttcgggagaaattcaagttgttcaaataagcatggagaagtgacctcccagagaggatttgaaaataacacatagaaaaatgaaactaaatatgcattgggatttctgaaacttttgactaaatgtattatctataggtccttgaaatctatcattatcttgtcttttaggttactttcctcctagatttttaaagtcttcaaagaaatactgatgatccccactaggaaaagagaaggaaaatgagttattcaaaatcaggcactgggaggactcagaattacagcattattattacttccaataattttaaaagagttaagggctctttgattaccaaatcattatcctacttcctatgtcatctataactagacacgaagataacttattttaagtttatttcacaggacaagagtaccaaagtcacaccctctctagaaggccttctcttgaaaaatgcacagcttattcgtcaggcacccagacttcaaaaccagactaggattgagtgcagccctgccatttcccagctgtgtgaccttggatgaaatatttggccactctatagcccagtcatcaatctgtaaaattagggagagtaattgtctccactgtgtagataacagagatggcaagcctttgttgcgccagcaggccagagtcatggctgccttttcttctctgctcttcacgtcggggacatggctgatggtcttaatttcatgcccttgcacactgactgtcagtttttgtggacatctgtagccagcattagtaggctggggtggggtagaggtcaaattaggtgtgtgggaggcaaacatgctaaagagggtcaaacccgccacatcattttatttctttgtgggaagcagcaacagtacctcggttcctaaggtctttctggagctgtggttctccaaaaaacattccagattttacccctcaggggtcatctggcaatgtctggagatacatttggttgtggcaacatgaggagggaagggttgtcactagtgtctagtgggtgtgggccagggatgctgcttagcagcctacatacagcacagagggcagtcccctcaacagagaatgattcggttgcaaatgtcaactgtggcgaggtcgggaaaccctgtctggtgtgagcagagggcagatcctcagcctccatgatgcctttcaccttgaccatgggagctgagtaatcccagccactagctctctcattttacccgagagatgtacaggaggaagatcagggtacaatggcacatcagccagggctgagacccctactcagcctgagtctgttcctgttatactccccacctcatcccaagcatcagccgtttgctgccaggagtgaacagatccagtgtacaaggatgcattagtgaccacgcgcactcactgggataacccacttggggttcacttgttagatttggtttgggtagtgtgtaaggaagaaaatgggaaagtccagtcaaatagtgtccaatttaaaatcaaatcagggtggaaaggaaaagtccatgatgatagcgaccatgtatcgggcagcatattctatgtatttctgattcagtgctcgcaacagctgcatgggtaatcatcatcgtcacactgtacagatgaggaaaagggagaaacagaaagggtgagtagcctgttcaaggtgactcagcgggaaaggacagagctggcatttgaacacaggctctcagaccccacaggctgcacctgtaaaactctcctccccacaccctgtcacatcacagagaggccagatgggagtgggaaagccgaagagaatctggactccaaccgagttctgcctcctagaagccgtgtggcctgggctgcttttgtaacctggtttttgcttcattttattttttatttttagccagtgggaattagtagctgtgcctatatcgtgaggttttgattaaaagagacaatggaggcagtgtgcctcacaccattgcaagtgaatgttatttgttctcattattcataagccacaatgaaacggcatcatctcataactttagtgggtcagccagaattgttcacgacaacagtgcggaggacacgggacagcactaagggttcctccctctccctctcgtttgacgcggactccagattcagaacccatgtggggcacaggtgggggctgtccaggctcactgcaggtctctctctgctttctgctccttcaggtcacgtggttgtgattgaaaagaggaatagagagatgtgatgtggctgtttaaaacaactccaactgcttccatgtaaatgatgtgtttgatcctaaactgagagggttaagggttggaactctgggcctccccagaggctgctgtgggtctgggggccaggactcctcaggaagaacccaagttgggtctgaaggtgacagtggaggccattatccctgagggaagacagaagagggagcagggagcaggtgggccaccgagccctggcgtgtgtgcagaaagtgctaaataagccggaagaagcacagcaaatcacaaggatgcccagaatataatctctagtttatagcatgaaatttttactttcctgttaattgtacattctgtataagaaaagcaggttcctttcctaaggagctttatgattttattatattattattgtttattgtggagaataattagcttgcacatcttttaatttgtcccattaagatgtttgcagagcagccgtgagaggctggccagccccctgcatttccattgatcagggcactcacatggctggctgtgagcaggctttgcggggagaaagtcatttatgattgcatccttcagcatgccgaacccctccagaaagggaaggaactttctgtgactctgaagtagtctgttgtagaataaccagaggagaaatgccttttatacaataaaggtgaagggggaaaagaaggggaaaaaaaccccaacttcttgacaaaaggaattatcatgatgtcagaggactggtgacatggactttgtgaaatgacaaatgcctctgcagaaaggccattctcaaaggccaaccagtaggcgtgtgcatctcaactcttgttatgccactgacacttagtggtatgaggtcctgtttacatgagtgactgaggccactgcttgctatcacagctgaaacaactgcttctggctacgatttttattttagcctcaggaataagtggatgagaagtgtttggggcaagcttcacggaaaaccctggctagggtcagtcagggttggggtggtccacccctgaaggagggactcaggtggcaggcccctgattgctgggtacatcactctgtggtttcttctgtacatgtgttccatggcctggactgggacagggcaagagatatacctgggacacaaaattcaaggtggtgcgctctcaagcccatgtaaatgcaaggtcagccttgtacaacaatgggagcaagtgtcgccttaagtttgtcacaggaagtgcctcatttatgtcaccctgatatcaccttcgatggattctcagattgataaatgaaaacaactggtcggtcaggaagaaggcatagcagtggtttctccccaccccagcatgtcaccatcgtcttgggaacaagtttgagcacccctggcttaaaggcgtgtttcttgtgggctgtctgggaactgcctgaacatctctctcagttctgatgggagaaacacgtgggcaggagaggtctggataccagtggtggggccataaagccaccaaatgcatccagagtcagaaaagcagtccaggatggtggccagtgccccagcttggtgccaccccacagcgtcgcctcctgtccatggggccttggcaagcctttcgctctgtaaggctaaactccctcatgtgccaaacagatattctcaacaccgacctgtcccctccacgggcagacagacagtgggctctgctgcaggaactgcctctgtttggaccgcacctccacctttcccagcagcctaaccacaagcaggtcacgtaaccttggcaggccatgcttccccttcactcagtgggattaataatgagagcacctactcacagggttgtgccaaaattttaatacagtaaggcaagaaaatgcttggaacggtgcaagtgccttgcgcatagcatatgctcaataaatgctagctgttattactatcggttttaaagttcataaactcagccttctgccaaagagcaccaagatcacttctgcactgctacatgatgagagaggcagacatttctttttttttttttatcttcatacatgcccagttcctggaacagcttcggggccacgttcttgaggttggcggagatggctttcctgtccctagcctccctttggtggcattttcagagttaccttgtacttattgacttcctctgcgtgtccattgctttatacatattgtctcaaatcctcttgacaaccatacaaagtagggctcattccccttgtttacagatgagaaacttggggctccgtgaggttcgataaatggctcaagttcacacaggtggtggatgatggtgacagggagaaaccaatacctcgattctaaagcccacaggcttcctgctccccgatcccacccctgagcttgggcctatcttcctcctggcctccctatcaaaggcaactcgtagaagaagcccctggtgataaagaaaacacgattcctcctggagctgagtggagtttacacttcaacatggactgaagcctccagggaaagaaataaaggtctgtagagagaagctacgtcctggtgagcagagacatgacagcagcagtttctgctacacctagagaaagcttccttgaattcagtacatcctggggagaagtcccaatggattccctaagcatgggaattttgaatgctggcctctctctctctctctctctctctctctctctctctctctctgtgtgtgtgtgtgtgtgtgtgtgtgtgtgtgtgagatagagagagagagagagagagacctttatttctcctgagaggccacttctgagctttgaatcaggagtgatgtgagcatatatatccctaatgggaattatagtttgggttccaatttttatacaaagatctcccacttcccagggctccttccagagctgaagcctggcagccttggccgaggccatctctgaaccctctgcatggatgtgcacattggctgttgtggtggttcaaattttgccctagaccctcatcaaaaccaacctggttaattgtaacattgcctaaggagccaggtgggcaggcacatggtgggtgcttaaccaaggtggtgctggattttggggaagagagaacatccaaatgacagcaggggccggttactcctatggcaactgcatttctaacacagcctaaggacgttcttaaggactcagggattcatatacattgccctgcctaatgagttcacaaggtgaagggatttaacctgcaaaggattgtggtatctgagcaatgcaaaggggaattgaggaggattaggagaagtgtctgctagttatgtgcatgcttgaatggaatccacctcataaattcagtgtctgcaaaactgtgggtgacaggagctgagaagacctggtttctcgttcggactctggcaccaaccagctatggaaccctgggcaagtgaacctctctggtgccctaaggtagagaaatgtctaaaaatcactccagccaaatattcggctcttcctttctagcagtttaaaaatatttataattatagattttaaaaaataaagttatataatttttagatgccaactgaaactatacagaactatatatatacataactctatataactctatgacacagcacataaaacttacaaagcatcatatagaacaatgtctcatagttcatatgtctcagggttcacttattttttaaacagatttattcacatctgtaatacaattatttctttgttttgaatacaacctggagggaagcatatgggagacacagcctttatttaaaaaaatgaagtaatgatatggaatgattgacagttggatagaattttcattgtcggcacttctacttctttatatgaccctgcacctttcacagtgctaatatttgtttaaggttgcttaacgttgttcctctcctctagaactttggaagtaaaagccattctcatctttagaaacagtagattcaataataataaataataataaactagaagcctgagtttctgttcctacctgtcagtcaatgcctaaataatttcattttcacccattcacccattcattacatgaaaggggctgggataagagagaacactcctgaaggggaggactactttttctcctccttttagttcctacccactcttgcatgggttttatacacatatgtggtttcagattttatgaattctatactttcaaagtgggtgaatgtcaagttcagctgtgactgttaccgagctggatgaagctgcccagatgcagcctgcagatggtgtggaatgaggggctcagtgcacagagttcaaagtgcaaacagaagctgtgtaagaaagtgcagcaaactgtggttggtgttaaaactgctcctgaaaaaaatggcactcaaaccaatgtatcttagttgacctaaactctcttttgcacattctggggcagtaataagaaacaaacattgatagctatacatattataaaattttgcacagtaaaaggggaagtgcttctctcttgagcaatgagtgccactctgacattttttgtctcccttaaaaaactcacctaggatgggccgggtgcagtggctcatacctgtaatcccagcattttgggaggctgaggcgggcagatcacgaggtcgggagatcgaaaccatcctggccaacatggtgaaaacctgtctctactaaaaatacaaaaattagccgggcgtggtggcacacacctgtaatcccagctactcaggaggctgaggcaggagaatggctgaacgtgggaggcggagattgcagtgagctgagatggggccactgcactccagcctggtgacagagctagtagactccatccaaaaaaaaaaaaaaaaaaaaaaaccaacaacaaaaactcacccacaatggaatgtgactatggaataccctgcggtgtgttcagagctctgacttctgtttgctctttttaacataacccccatctggcaagctgactgctgcaagattttctgggtctttctttaggatctactaacaatgaaaaacatatatatgaaaacctacacattttcagaagcacatgagagctgatcaagacccacgtacctcccaaggagaggagatgacagaggctgctctgtggtgttgctctcaggctatatttgatttattgctcaaatcttattatttcattctccattcgagactagcaaagtttcttttgagaagtcacagtctctacggagggtattctaacgcccagaagtaaaagttggatgttggcaaagaaagcaaagtagaatctttgcaaaatgttggagctgcatagttctctctcccaatggacatgtttcaagactgaatacgttgagtatttgatttagaatcaatttaacatgaacttcgcatttatgcaaagcagcatcagtcctgagatcagcagagcgattgagcaagcccaactagcaaactgagatttctatttgtgatgacctttcccatttgaggccccaaaaatgtcttggggaactcattgtttaaaaagaagtccatcaaaaaatggacacatatggaccatggcatgggagggcagtgctgcatacaaaatcaacaattctctaaatgaacaccgatcttgcagaaaaacaaaatgaaagcaaaacaaaaagaaatttctaatttcaagagaaaaactgaataacaactttcttttcattcatcctttctttcttctttttctttctttctttttttttttttttttaacgaagcaatgactttctcagggagaaagatttgcatccatgctgaggaaatagacagggccagtaatcacacagcaacaatcatctgtaacttgcagaaattcaatgtatgaataagtgtttaaagcctagatagagggcaattatctggttatctgtttttcatatttctatcagagataaaaacctctttagggaaatttatgaagggccatttgaaagaaggtttccctcttttgtagaaaagaattctcttaaaaattaaaacaaatttgggaggctgggggatttttgagagtttaaaagagtgaggaagatggggggcgggaagcaactatttccagctgcgagaaaccgatcaacctcacagcaaggtgtggtggctctgatgcaagcaacattcccatagatacagggctgtctggttttctattgctcattctaacttgaggagacgctcaagtgtgatttggggctttgacactgaaaataggtgtgaacttggatccatttaacctagccccttcccccacctcatcccttctcctgtccagtttgctttcaatgggtcaacaataaatattcacccttggcatccatctgcaacttccaagagggaatgaaggaagaacataaagtttctctgcatttgtttccaaagcccagctggcacagaaaacaaatgatacaagatatgactgggaaggcacacagcctgtctttgtcaccaggtctggcagatgtggctctgggttcacgagacatctgctcccagctaccttcctctctgcttccctccactctccaggctggaaagtgacaactccattgtcctcagttccctccagccagaggcctgtgacctagttgtggcctaagcaatatgtcagcgaaagtttgcagagaagggcttcccttcctgaataaaaataccaggacccacaagaaggggttgaggcctcccatgtcctttctgcctggacagatcagaggtgcaggccatctctccctggcctcagcatggtgggaccaaaacataggagtgtcctgcaccccaccgtatcagcctggactgctcactctggaactcctgcccgtctgctcaagccactgtggtcagcttttctctacgtgcagccaaacataattttcatgggtaaacctgagcaagggccttactctttctgtcactgcaataaaatacataatttccgtcatgtttcggatttagtgtttattcctccaccttggctcctttctggcatcattactcagtgttattgcaagatgagggagggagagaaagagagagattcagagagccaagagagtataacacgtgtctccccaacaaagagtgaagcctgcgcaagtgagagcagtgtgtctgagcttatcctcccagcatgttgaaggtgacaggaggttttgagccctgttttgtgttcaagagccagcctgtgttctcgtaaagtactccctgattgtgttcacggtcagcaaagatctcaaaggaaatgctccctttttaccactccaggacatcctagttattatattttatgagagggaagaggtcaagaaagacatacctctttgccttggctggaggctcagcaaaaaggctaaagaaggggactggtggcatctgatggggaggagcaggggaggccgagaaacaagagttgtgggaaaagtgctttgaacattttaatatctgttcaggcaccagtgtagcttctgaagatttcttgaaaaatgggagttggagaaagcaattacgaaaatgagggaaaatatcttgcatttgtgaaatgatgggagaactattttctaaacagaaaataaaatatttttaagtggctttgtgttattaagctaagaagatttgtgatgtgttttatggtacctctttctgatgcatgtaaagacttccaacaggaacttggtaatttagatgcaagcttgtctagaatattattagcccattttgcagaactcaaatgagacacaaagacatctattgactcatctaggtcactaggaagttacctgagaaactgaaaatttgcttgagtttcctgtgtgggcctcctctgctgcctccaacaagacaagccatcaaagctaccttcatgtctgggctttgacaaagtacatgattacaaatgttcccaaggagcagggaaaatgggagtctctcagaggcccagagaacctgctcaaaggtatacaggcaaaatggccttttccttaagaagagccttggagaaaataaagctacaccagcagtctcaatgaaaagagacatctctgttgtccttgtgtgttcagatcaaagacttagcatgacatcctgccccaactagcctccatatttaaaatcaaaacttgttaagttgaatttcataaagggctctcgttctttttccacaagggaaggaaggctgacctgctggtgaaaagcccttagggtggactgagttacccactgctgtccatgcccatgtgggatcctgcagctctaactttgcccaggctgtactctcggcctagaccactcttccttctttcctttgttcccaacttcccctcccccaactcctgtgtccctctctccagggagcctcctgtaatgtcctccagggcattgtgacctctccctccctagagcagacagcggttgactggctgccttcttagataactgaacattgatagccaccattcagatttattgcttactttatatggctgggcaaagcaccttacacagattaattcggtccacacagctaccttaataacaggtactattgcaatccttactctgcagatgaggaaactaaggctcaagagagaagttctatatgctatttgatgaaagccagaaaaaagaaaagaaagaaaaggccatcactgtgtcatctgagcacattccctgcacagacctcctgccattgctttctctaatagcaggtgctcttatgcctccagactcttctctctaggccttgggctccttattaaagtctgtgtgtgcacagcggctgtgcagccgtcctctgtcccagcatctcaccaggcttgatttctcagtaaagggctacatattttctgagcacatctttcggatctattttgagagaatgtaggaacgtctcagctactcatttgctttcaaaagctcagaaaggcttcttgccattcagaatcgggtcagttgctgtttccaaaggtgcttctgctactggttgctccatgcccctgtactcggtgtgtgagcagctgtggggcctcctacagccccctaaaccccactaataaagtcagtctgaagtacaaagacaatcctccccaagaaagcagagccaagaggaggtttctttggggcggctgccatttgctcttttaacacttaaacatttcaaaattactcgtcattttctacagtttcttagcgtgcaaaaagtctaaatggcaaaggcatgattgtgagtttagatagttttatcacaccttttttttttatagtttcaaaatgtgtgggcagtttcagatgtgaaactccatctcacaaaggaggaactacagtctgattctttaacatccaagagagcagccaggatgccccatcccacagtttccttgtgggccagggtgggtcagatttgctaagacccactgttagggactgcagtatgtctccctagaattaatacattgaagtcctaaccccaaggtgctcataatttgacactatttggacatagggttttaaaatgacgtcattaggctagccccaatacaatgcaattggtatccttataagaagagattaggatacagacacacacagagggataaccatgtgatgaaacagggagaagggagctgtctgcaaaaccaaggagagaggcctcaccagaaatcagccttgccgacaccttgatctcacacctccagtctccctccagaactgtgtgaaaataaatttctgtggcttaagcctgaagtcttaagatcttaagtgttcagtcaagccagaagaagtgtcttaataaatattcttctgaaaagagcggcaagccgatgcttagagaagaacatactttatacatgcagctttgtacttggcaattccctttgaaagactgcttcagtggggtaaacttgaaccgctgagaagacaagcagggagtcggtctcgctgagatttttacctgtggttctaggaacgcagaggcatgtgagtgttcaggctttgcatagaccactaagccacttctaagaacaaggctacctgagccattttgcaaaaatatgtacgtgccgaggcttttcctccccacacctacctcaactctttctgccgacacactgcacttttcaagggaacccaagtttgggttcggcaagaattgtacgttgcacaccgtgtgtgataattccagggaatttcaatcgcatcttgtcttccttcctaagcaaattcggtgggaacctggtgtggtgtgatagaaaaagccccgagttctctgtggtagaccacatcaatttcatgtgccagtctctcagactccggcttgcctctctcaaggaagggaacaatggtttgcttggcttcactcctctctttccccccaatttccacatgggtatctggctaaaaatgagttacaggtttccttctgtgagaattgcatggactgataaagtaccatcccaggaagaaaacaaagatgctgtcttccctttcggctcacagttgccgttggggagggaacacacgctgtaaattataggcagccagaagtgaccgcattgaccactgcgagtggcccagctatggcaacaggctgagaactctgggggagagccatttgttggcagggatggtgattcttctagcatcaagctctaagatgatgaccaaacggtatcaaaagaaatgatattttgctacctctccggcttgggtgaatgatgtggacagttaacctggacaatttaaacctttatgttgatggatcacttggatgaaattaaccaggaaattgccaagatttcacttggccctctgacatcaaatctcaatattatattaccaaattagagattctaaagaaccctgagttcctttcactgaaaggaaggagtggaaaaacctttccagatgatcccttttgagtcttggtgcgagctcaggccctccctacactgcctccgtgaaagctaaccgacccttgttcctaacctagcgcaggtcagctgagtgtccatcgggcacaggagccctgggcttgtccgggagatagccagactcctgctatttcctgatgtctgcatagctcagcgtgtccctcaccatctttgccgttggccagtaaggagagccccaggggccagcactgcacactgaaacccaacctattgctcaatggaatgcttaaaaatttcctgaatctgccttcctgagttgataaaataggaaacaatacacgttctgagggggtactgaaagcagagtaaagccaggaagatcttttttttctgttattctatacaaatattgcttcctctgcttgttagcagcccagaggaaatgcagccagggagccgtttgcagcttttcaccagtggccggtgtctctgtgttaccaaccaaacgacgctgcaagactagtgactaacgcacgtctgcatgattcaacttcactaaaattccctctgctgccagtaaagaagcacttgaaaactctttaatttgaaacttgagcttggttaatgacttgttttcttctctttctctttaacttctctcttgccatctccaacacacacacacacacacacacacacacacacacacacacacacacactctctctctctctctctctctctctctctctctctcatcaagttttttaatttcagggacccggaaacatacagccccgtgcattcacaatagcatttgctgtgataaagtggccggcaagccctctgcattcccctgctcacttagctgtatgaataaataatgagtcacagatacaatttgggtgctcaagagagtttgtagccagaaaattaattattctcccatcccagcccactccatctcagctttgccaaaccatcaagatacactttgcaggcactggtcagagtgcgtgccccgacgcacacggcaatgcctttgagacattttatgttattatttttgtttgtttaagcacagccctcttttaccacgaaagatacacaagacgcacatgcacacacatactcacacactcacagctcaaccacagctttgtccatttcaagaggctggtttcaaaaatggagacaggttttccaccctggctgttcctattcataagcctgtaatctaacgacttaagctgcgagaatgcttaactcgggaaacttctctattgcccttttccagagagacctcggtatgccacaatttgcttcctttctctcttgaaagatgctggttgtctctttgcattgaggctacaaggaaaaacacagcacagccccatgctgatgattttaacctaaccaagtctgtcagtctcctgtactctctgccttatagagacagctgccttgccactttggccctgaagtccccaggctggtgcaaggctatctgagagcctccgcctcctgccccacactggcaccagccctcctggctggctctgtgcatgtgcctgctaagccccagggcaggctgcattctgggccacacagcatgccgagttaaggataactcagacacaggcattccgggcaagggacagcaaaataaaacccagggagcttcgtgcaagcttcataatctctaagcctttaaacaagaccagcacaacttactcgcacttgacaaagttctcacgcaccgactgaacactccaacagcataactaagtatttattaaaacatttctgaagagcttccatctgattagtaagtaatccaatagacttgtaatcatatgcctcagtttgaattcctctcacaaacaagacagggaactggcaggcaccgaggcatctctgcaccgaggtgaaacaagctgccatttcattacaggcaaagctgagcaaaagtagatattacaagaccagcatgtactcacctctcatgaagcactgtgggtacgaaggaaatgactcaaatatgctgtctgaagccatcgcttcctcctgaaaatgcaccctcttctgaaggcgggggactcaatgatttcttttaccttcggagcgaaaaccaagacaggtcactgtttcagcctcacccctctagccctacatctctctttcttctcccctctgctggatacctctgggactccccaagccctattaaaaaatgcacctttgtaaaaacaaatattcaaattgttaaagattaaaaaaaaaaaaaaagccagcgccgccttggctgtgggttggtgatgctcaccacgctgcgaaaccctgtggtttgcattcagtgtgattcgtcctgcctgctgaccactatgctgggttcagacttctgacactgccaggctacccaacttgtggttctgtggttgtttatgaggcccaaagaagttttcacacaacccaaattacaaatttaactgttcccctttccacagcccatctcaattggttcttgccaatcatgtgacttaagtgatgtcaatttttttttttcttttctgagcaatgcccttccttccctccacctgccctcccccaggctgtgcaagaaaatagccgagtagactttgcaagagggggggatgtagaaaaaagtgactcagtcacttattatatctcaatggtctttgctgatttagtacaactcggctcctgttgttatttgtggtttttggaactactgattattttgataaagatttcattgctgcttattcaatagtaattcaacgctggcatcaagccgctgctccgacaggatgtggatcccatcatttaaaatgctaggcatcagctccgggagagttaagtccttggtaacgtctatcatggcataagtgaaactataaaagggaaaaataaataaaaagaaatgttttggtgagagtctgacccctacaacgggctggcaactcacaggtattttaaagcctgggaaagggaaagaattttacttttgaaataaaaggactgttttaatgaaaccaaaattatgtggttttattccccctaaatggacaactttagtatgtatctctttcagtaaagagataaaatcatagtacagtcttaacacacacacacacacacacacacacacacacacacacacaaattaggaagctaaaggaaaacaaagcagagagaatttctgtatttgggacaaagcagtggttactctgcagatgtttatttgtattgtcacttgggaaagctccctgtattgcctttctctagttcaattcaaatcaataggctaatttacacctgtaggtaaaactacactttgagcacatgaggatgccacaatagaaggggaaccaggaggagacacttctcctggggctgactaatgaatattatatagcgcgtcctctaccttagaaagacatgcctgtttgaagatgctaaaaacaggataattttgtaagtgggcaaaccactgtggtcacacgtatttcattttccggccccactggctttacctgctgacaactaaaacgtcattttgttttgtagttccaagatgaagaaaggcttattttcctgatttactaccttattcatttggctctgctctgcctacatccgccatagcactctgcgcacgtgaaatttcgacacatagggtcaagagaacctgtgtgatgatgggttgtaaatgccagtcctggattctaagctgcagtagccagcacaggcacttcagaaaggctgaactcccacaacactccctcggttttccctcatccacttaatttcacacacacaaagacccacaacgatagtagcttccatggcacaagtctttcaaaaggaacagacacaatttttacttactcctgttttgactaaagcaggaattgaaactcaacagaccgctttctcttacacttgtgagaagttagctggccacatgttgacactgctaacatctaaaaaagaataatagtgctacatctcttttatgaggctcgtgaatctttaaatgtgatgcgtgtttcatattgcttctcagtgcaaatcccctgtgaacataatgaacataatgggcctgtgttgttaccctccctaataaagtcaagcctgagttgaaccccaaaccaggttcatttttctctcccacacttaatattccctggaagggccctaagagccgagggctgtaatgtgcagctgccactgcagagtcgactcacacttaataatgacttagcaattcaaggggccatacagaatatccttgggagatttaattttagaaactccccagatgcttttagccttaggtgtccagatgcttaggagaagggtttggatgaggcagtgaacggcctgaattctcaacttttctctttgggcctagctctagccagatatctatttcttccagtggggtctttgtaggacaggttagagtgtaaagacactctaaggctggggctcgttgaagcctcactatacgctgtcatcttcgggactgaggtttcaacagggcaccagggggcagaatacaaaggcctgcacgctggccctgcacggccttcctgggcggggttaacagccacggcagccgcagcataacttcgcagcttggtgaggcaacagttggagcttttctgggcaccctccaggtcatgacaataagtaaagcctcagccagctgctggtgaacttggccttaccacttccctaggagcccaagacaaaagggcacgtctgtcatcaatgaaccgcctggagaaatacttaatcctaacttaactagaacggtttaggactctttaagtttgtgtattgacccacaccctctgtcctagttcctgcaagtgactcagaccctgggtttctggcttggggattgtacccaagagtctgcagtggactgtggctttgccaaggaattggatgacagttttcattctcgctcatattggctgcagcttctaaatgccaccatgggtgggggggcggggtggggagaaaatgctcaggtgtcttttttaatggccctatgaaaatactagaaagggttgacagatgtttacctgcataaccctgtaattaatgtatagacttctgtgtgcagtccaatccaatcaaagcaccctctgttagggatattcattacatgattgccgcatgctatctctgaactccacatgtctattataaagtagattctctggccagaaaatggaggcagagatggaccacccaaattggatggagtctaaaatcccaggaggacaatgctactgaattttctctatgtagcgtggattttccttattttctaaatctgttttctaacagatgtcctatccagaaacttccatgctatgctgacagtgaggtcagggatgatttttaaattgggacgtagacatcaaagcttcatgggatgactataacctgcttttggcaaatccaatggtttgagacagctagggagccctagaagcccagctattaaagatgttctttcctggacactcatgatggtgcccacacaggacacatctctcttccgcacaggcctctcacttctttagataaaggtgcaattcaaatttaagctacccaagactttattttttttgagacacagtcttgctctgtcgcccaggctggagtgcagtggtgcgatctcagctcactgcaagctccgcctcccaggttcacgccattctcctgcctcagcctcccgagtagctgggactacaggtgctcgtcaccacgcccggctaattttttgtatctttagtagagacggggtttcaccgtgttagccaggatggtcttgatcttctgacctcgtgatccacccacctcggcctcccaaagtgctgggattacaggcgggagccaccgcgcctggcctcagtatttacttcttaacctttcctagatgaagaggtattgttggggaaatatgatttcaaaaggaaaaaagaaagaaaaaaggcagacattgaaaccaacctgccacttgaatgttatgtaatgatatgaagagcagctagggagaattatttcaaatgaaagagtttcaactgcttcctcctctgcttgcagactgcaggtgagcagtgtcgatggcacccaggaacttgttgagactctgcattgcgggctgtatcccaggcctactgaatgagaatctgtatttttacagttcctcgggtgattctatacacattaaagtttgagaaacattgctgaggaaagccttgcatctattggaatttagtagagaaataataacatggtgtttgcattctttgagatgtctttttcttcctttgagctttctgaaacttttctactttgttgctctgacataattttgtaagccctggatgtttctagacagcagaaacccacaagaggcaaggcccacgtcctctaaggtagcattttcttggattgtcactcggacctctcatctcaagtgccgtgtttgggtcaagtttacagtctgaggtttgacacacaatgtagggaggctctccctgtgctccatctgcctagctggtggccatgtgtatataaacagaaggctttttcctctgggggcaccagactctcagttttcacctagtctgcagtttggaaacacattaatcctgtgagttcttccagacacacagcacgtgtccacgtggcaggcagcgtcgcaggtggccttgcagtcctgccatgggctgtccccctcccagagggttgcctggccccgctctccagccactgccttgccgaggtcatgccctcctttgctgcaaaagaaagggcccactcttgaattgtgcttccttggaacagccaagcctcccaggttccagaggctccatttgtgcaggcacccaggggtttggctacttctctcagacgcatctgggtcctttcaggctgctctgggccagaaagcttgtttaaaatagcttctccttacagagttttggcccttctgcttctggtggcatttgaaaccaggagggtaaaactggaaaacttaaacaaaccctctttgaatgttagaaatgttcagcattcgaggtttggtcaaatgatggaaaacattccgggttggtactgaactttccagccagttcctccaacctgacgctaattatagcctgagatccaggcagggaaagcaaagggaaatgaggaaactaaaattacttggagttagagaagccagaattcatgttggtcagatagtgtacaattcaatagttcagtttatgtggcaaataatggttaatgtcccaagtctgatcaaagcacctggattcaggaactttgcactcttattgaaatgctacttcttttccctggggtaggcaaattaccaaactttcacatggctatttagaaactaaagcataacactgcctttttcactggggtgctatgagggtcagtaactggactatgcaaagtggttttgaatggaacaagaaagagatctgtggttgacatttcaatatggaaacatccagtatgtgaattttaatatctgcacttgccagggattataaaggcatgactttagggccctaactgagaggacccagtaggatcgagctgaaaataccctctgtagttggtgctacagagatctttagtattcaccacttaatttttgaattaaatgttcctttgaaataataatactcagctctacagattcaggctaaaattctttcagatcctcaaaatgtccaaatcaaataaaaatatcaactcaactgagaaacaaaatattgtacttaaaattgtgtggtgtgtattttaatttcctcctctctaaattccctttccttcctcttgccagtatagaaactggctggatttttggaaggagagcaggaagaatgatcttgtctatgttctggttctgatttcatttctttctcaagtttttagtttattcaaagcagaaggaagaaatcaccttgtaccccacattaacgtaactataactaccaggatatgatctttcaagcatttggggctgattgtgaatgatccaccacataaagccatcactggctcttgaaatatatgtggatgtatgtatatgtattgtatattatatatgatattatattacacatatatgtattacatatcatgtatactatttatttatttatttattttggtaagaatatttaacatgagatctaccctcttaaccaattttcaagtgtacagtattgttaaaaatacttatatataggcattatgctgtacatcacatctctagaaagtagtcatcacgtctaattaaaactatgccaaccgagcaatttcagatttctccctcctctcctggtaacttctgttccacttgctaattccatgagtttgactattttagatacctcatattaagtaatatcatgcagtatgtatccttccatggctgacttatttcacttagcataatgttctccaggttcatctatgttgttgcatattgctatacttcctccttttttaaggctgaataattccactatatgcatataaccatattttcttaattcactcatctgccaatggacatttaggttttttccacattttgcctattgtgaatagtgctgcaatgaacttgggagtataaagaaatatctctttgagatcctgatttcaattctttcgaataaatacccagaagtgggattcctggatcatatagtagttttatttttaatttttgagaaaccttcacattgttgtccatagcagttgtaccattttgcattcccactaacaagtataatatgtgtgtgtgtataatgtttgtgtgtgtatatatgtatgtatatacacacatatgaaatcaaatatatactaattgaagatactgtttcacacacaaggcttgtatctgagatactaatccttccaggataagataatttggagaattagcaagcattagcagaactaaagcattatttggagtaaaaaggaagagtattcttctggtttccatagtcagagggcaatgctatttgtgtgccagacacatcagagctataaaggccttcgattattgtggaatattacttttagttggtctccctgtgcttttttcacattttagcattgttcataattctctaactttatattgaaaatgaagtcccaaggatattatcttttgcccacatggactgcatagtgtgtgaactgagccttcagaccttactcagactcagagttgatgctgaacagacattagggggtttcagaaattacctgcagctcttaaagaaattctgagctacttggaaattttatttcttatgtctgcattagtactgtcatcaatgaacagaagttcatggagcgtgcactgtcaaattttgcaggtgatcttcaacctattcctgtggtgcttttgtgtttaaacaaagaatcccatcattatccttttgattggtctcacttgccaatttctgctacttttaaatcacatttccatgattgatggacctcttttctatctacccctctatatttgctatggccatacctatttacgtgtgtacacatacacacacacacacacacacgtgtatatgtgtatacatatacatatgtatgtatgtgtgtatttagctttatcttctcctcaaaacctaactctaagagcccttcctccatttccttatctattagagtttacatttgggtctgtccccccacaccctgcttgggctcatgatttttatgcttttatataattagtgtgtagcatgctccaaggatcatagcaacattgctttcctgtgatcctataattcttttttttccttttttttgagatggagtcttgctctgttacccatctggagtgtagtggtgcgatcttggctcactgcaaccttcacctcctgggttcaagtgattctcctgcctcagcctcccgaatagctgggattacaggcatgtgccaccacacccagctaattttttgtatttttagtggagacagggtttcaccatgttggccaggctggtcttgaactccggacctcaagctatccacccacctcagccttccaaattgctgggattagaggcatgagccaccgcgcctggcctcctataattcttttattattgcaacataaatttacttgtcttaatcttaggtagaattattcagttccccctttatccctgcattgtttatctcttctgatctttttcctgggccttaccaaatatcaggaacaccccactttctctgcaaccttatatatttcactgagtatttattgagtactcaattatttcactgagtatttattttctagccatggacaagatgaacctggttggttatacttagaagaaggtttacagtcttataagccattcacattggaaatgaatgaatagcaaatactgaaagcacaggtatggccaggattaaaactagggtaaggtgagtgaggctcccaggatgcaaaatttaaagaggcatcgactctcagtgtcgaccccgtgtcgcacaacctgaagggtgagggcttccttaaattttgcaccttaggtgcctctcttgccttgccattgtcctgaccttgggtatggctcatgaaactaagcagagaccatgagctgggcagagggcggtgtctgagtcaggaaggggttttgtggctgaaaaacttgtagccacaaaataatggagtcctgagctggaccttgacaacatatgcaagtttcattttgtctgtactagacgtgtacagttttgaccgacaaaagaacagggggaggagaaagaaggggaagggctatgaggtgaaaggcagatcagaaataagcccagcttggaagaaagtgaggatcccaacctggcagagaaagaggagctgatgaaggagactagagaaggacccgtctggaaatacagaacttggtccaagtaaaggaggaccttgaaggtcaggctgacaaatttgcttttattctgtgcataatggggagtcaccaaaacccaggaaagtgaggggatgaaatcagaacttttggaaaattgatccagtagtggcatctatgattatttgattaatctattgactcttgatagcagaggtcttggctatttttgctcattactgtatctccagcatctatcactgtgtttgatatgcagaaactttttgatgaatgaattaatggataaatggatggatgaggctttattaggactagaggctggggaaccagaggttgtagtattcagctatggagtaacgagctccttaactaaggatgtgggtagcaggaatggaaagcaatgggactgtgatagttgactgcattaagagcctcagttttttggacctccttgtaatctttccctttgccctgtaactgtggtctcatcccactctgaccctgagcttggccttatgacttgctttgggacagtcacaaacttgatgtaaccagaggcttaaaatggaaaagtgcttccacatcagaatatgctgggctggtgtatgggaaggtgagacacatggaagacaagagccagtcttcccagctgaggctatcctagaccagctgatagctagctgaccactggccacttaactgagctccagcccaatgtagaagaactggccagccaaacccagccataaccagcagactgccttgctttctcatagaaacacgatcaataatacaggattgttgtttcaagccatagagttattgggtggcttgtaagactgaattattgtggcaatagttcctgcagaagaggtagagattctgaaagcatcagaatggagctgcagctgtggctgcaagactgagtcagttaatttgcaaagtaaaagagaatataaaactgaaggtggggaatgaataaaagaaaggagtaggaggagaaaggagccagaggaaggctggcaagtgaagtaggacaaagataaagggagtacagtgcaagccaagggaggaagaattgtcaagggagggaagggaaacagagttagatgctgaaaacagagaggcatgaaaaacaaagactatggaaaggtcaacagatttgataagaaagagttacttgaggtctgttccttcatgacacctcatcagactaaacagaagggtgacatccaattttgctggcatgcagatgagcagttcttcctctgcttgaatagaaagttaatatgaagttaatgattactcttttgatgttgttcgaatatatatgttgattatatggcttttctgtttcaatttaattcaaaaatattaatatagcatgtacttgatagaacagagataaattacatgtaaagaaagattttgagtactccttgttcctgctttttttaaaaaattttttattcttatttttaattcaagttttattttaggtatagagggtacatgtgcagatttgttacatgggtgtgttgtacccaggtagtgagcatagtacctaatatgcagttttttaatccacagcccacctcctttcccactctagtagtctgcagtgtctattattcccaagtttatgtccatgtgtgcccagcatttagctcccatttgtaagcaagaacatgtggtatttagttttctgttcctgcattaattcacttagcattatggcctctagctctatccatgttgctataaaggacatgatttcactcatttatggctgtgtgctattccatggtgtatgtgtaccatagattctttatccaggctaccactgacgggcacctaggttgattccatgtctttgctgttgtgaaaagtgcagcgatgaacatatgagtgcatgtgtttttcgggtataatgatagtagctctgtttcaagttctttgagaaatctccaaactgctttccatagtggctgacctaacttgcattcctatcaatagtttataagcattctctttttcccacagcctcgccaacatctgttgttttttgactttttaataataaccattctgactagtgtgagatggtatctcattgtggttttgatttgcatttctctgatgattagttacagtgagcaatttttttatgtttttgggccacagatatgtcttcttttgagtagtgtctgtttatgtcctttgcccactttttaattggttgttttttgattgctgatttgtttaagttcctcatagattctgggtattagacttttgtcagatgcatagtttgcaaataatttctcccattctgcaggttgtctgtttaatccattgatagtttcttttgctgtgcagaagctctttagtttaattaggacccacttgtcaatttttttttttgtttcaattgcttttggggacttagccaaaagttatttgccaagaccaatgctgagaagggtatttcttaggttttcttctaggatttttatagtttgataccttacatttaaatctttaccccatcttgagttagttttggtatatggtgagagctaaaggtccagtttcattcttctgcatatggctagccagaaatcccagcatcagtcattgaatagggagtccttccccattgcttacttctgttggctttgtcaaaggtcagatggttccaagtgtgcagctttatttctgagttttctattctgttgccttggtctacatgtctgtttttgtaccagtaccatgatgttttggttactatagccttatactgaaggctatacccaacttgaagttgggtagtgtgatgtctttggctttcttctttttccttagaattgctttggttatttgggctcttttttggttctatataaattttataatcgttttctctaattctgtgaagaatgacattggtagttcgataggaatagtgttgtaaatttctatgggcagtatggccattttaacaatattgactcttccaacctatgagcatggaatgtttttcgatttatttgtgtcacctctgatttttttccgtggtattttgaagttctcctagtacagatctttcacctccttggttagctgtattcctaggtgtttcatttcctttgtggctattgcacatgggattgtgttcctgatttgactcttagcctggacattattcgtgtatagatatgttactgatttttgtacactggttttgtatcctgaaaccttactaaaattgtctatcagttagtagtcttttggcagagtcttaagggtttctctatataaaatcatatcaccagtgaagagagatagtttgtcttcttcttttcctatttggataccttctttcttttgcctgattgctttggctaggacttccaacagctagattttgaaagcatgttcgagatgggctgttgtggggtaaatagggatggtccttcaaaaagaaggacagttcacagcagctgtaggtgatgagtcttggcaggatgctgtggccactggtgctattaagatatgatgaatatgggataacagagtgaggtgtccagggatttccaaagagtgttcaagaactatttggacacctgatcctcagggaagatataaaaaggtcaagagtgggcactgaagaaggaagtctttgaagagagtgattgaaatgtaactgatgcactcgtcttctccgaccttagtgaccaaagcatagaggggagcctgtctgtcacatgaaatctagcaagaggggcttgaatcggatcatgcagggagcatgcgtccatcagtcgaggtctgacttatcccctgggagagtggaagtgtcctcttgtaaagtaggatagacagggatagcattaggaacttcccacatgcccctttaggaatcctcaaatatggaatccctaaacgagatgttggctaggcattgttttaaaagggattttgcctaagaaggtggacttttcaggcaaggagattttagcccagagaggttatgatacagaccactgggagcagcagccaagaaggaagggaggaggggccgatagcctagagagggtacagcttctgtaagggcagtttcagcagaaggaccctaatgggagtgccaatcaatgtggaacccatgagagtacacagggcagaagcaattggcaataaacatctatgaggcccagagagagctgagccatctgatactagcagcagacaagcagcctccccatcctcctccctgtctcccttcaccctccccagcatggcagtgtgagatgtcttggttagcaaggagtaagggtggatggaggaatctaggctgctggaagaaaggagcttggccacattccattaacccaaccaagcagtcgccccagtaggctccaactgtggctatgggagtcaaatcaagttttcagttttgatgatttgagattctgcgatttagagtgaccataggacttttcttatctaagtgagaggcagagaaaggatcgcccacattgaatatatttaaaagaatagtgaaagacaaaaatcaagtgagttttcaaaaagtggaaacaatacaatgtgtccattgagtcgaatggatgaatggatagaaaaaatgtggcgtacatgtaaagtgaaatattattctgtcctaagaagaagtgaaattgtgatgtgcactacaacacgggtggacattaaaagcattatatttagtgaaatcatccagacacagaaggacaaatattgtacgattctacttatgtaaggtagccaaaatagacaaattcatagagacagaaggtagaatagaggctaccaggggctgacaggttgagggaaaggcaaaccattgttggatgagcatagaatttcagattggaaagataaaattctggagatggatagcagtgatagtcgcttaacaaagtgaatgtaattaatggcacagaattgcacacgaatgaatagttaaaatgataaatattatgtatattttaccacaataaaaaaaattaagtggcttgtatgattagaattctttgtgtttaaaataactctttatatccatgataagactcttatataatggtttatataatggtctgtacatcttctgggtgagtagcagtggatttatttattaattattactcatccccttccccttatcaatgctgggttggacacttggatatagatatggccaagacccggctcttggctttaggtgattgggttagtgtagtctatcttttgtcgtgagaccctcaagaaggcttgtttaattcagtgtgcaacacagttaatataatacttcttaactcattggcattactaaatctttattatttttatgataattagaggaagcaattagaagactgtccagcaaaatgattcttcagaaagtttctgatttagctgcattctctgtggcactctatacctgctgtctacttacagaggaacgtagagttgtgtcttaattgagaaaaataaaacttaaaatcatttttttctagaatataaattactattattagggttgactgcaaaaactctacagacccacaaactcagacacacacacaaacacatacacacatacatacacacacaaacacaaacacacacacaaacacacatacacaaacacacacacacaaacacacacaaacacacacacacacacacacacacacacgctttagtccaggatattgatttcactttaaactctggcctcacttggcacgaatgtttgggcaagccctaacatattacctttgggtattccccattcctgtagttagtcaaccacacagagggcagatctagaggagataactgatttaatgataagttaaaggattaatcctttttctgcagcatcttaatatgcagagattatcttgtctgatgcctgagttataaatatattgccactcgtgtttaatcccacacaccacctatcttttccttgaatctactcaagtgttcaacaacagccttctaggtttctgcctcccaggtaattcagatgaaaccaggaaatcatgctgataaaatagtttcatcctgcttggaattgcgtacctcgcagtgcacccttttcagagaagctaaaggaaattcaaaataagagatggagtcatgactcggggatgacaactatgtctctgtgttctgctgtattcaggacagtgtggatcatggactacctaggacctgcttctgaaggtagtgagaagcagactcaaccatgaattcctttagactcagagcccttcacctattaatatatacaacatacacacattttaactccaagacttccatttttattcctatcacttatccaatctagggagctttagcttaccctctctttttgagtggactgaaaacatttggataaatcaggtgattccaccgtacttcaaaccctcaccttaatggagaaacatatttttggcccatcacttcctttgaatttcaagtttatccctaccaaggacatatttctctgatgtactgagggtaggcttgccagacttagcaaaacaaaacaaaacaaaacagaaaaacaaacaaaaaacagcatgtattgttaactctgaagttttgagaaacaatgaatgagtttttagcatgtcccaaatacagcatgggacacgggtaaagaattattcattgcttgtttgtaattcaaacttaactgggcagatttaattcatttactttaattcatttaatctggcaatccctgttgacagccaagatgtgagacatgcatgtggacacatttcacctaagaaacagaaagctttgggggtttatttaaacatacaggagaagataatagagtacgccattgaacttcaatcactgcaggctgctgtggattttttttttttccttttttcttgcatccttttcaaggacctggagaagtgttaaataccaggctcaccctgctaatggtttgcccaccagtaagaaacaatggcaaaagggatcatttaccttgttttctccatgcgggactcacctgctttcgggtccaggcgaactcgctgtggtattgttcttctctgctcggtttccaaaggagagcccaggcgcgttaattgctgggtggcagctacactaaatgcaagtggacgacagctgggtgccgggctcgctctgcaagagaaggtttgggtttccattgtagtccgcatcataatccgcacccttccatctgcactaactgttgttttaggtctcaagtaattggctggagctgaaaacataaacacctccacgcgcttgcccttatcattttctttttatgttggtttaggaaatacacctgagagaccaaatgcatacaatgaatccagcaattaccaaccaccatgggcggacagcaaatgctcaaacaacaaaacacccaaggatgggcggctgctggcttctgactttcctcatggggatgggggtcccagatctgggtctaggactccctcccacttctgtcctgggacagctgatttcaatactgccaaagacgtggaacttttcttaagaaggttctctcctgatttattttgagtaaacaactgatacaggttatgtatagtgctgggaaaactaatgcagagaaagaggagggacataactagttttgttgtcatctgtggaacatttaattgcaaaattgttgaaaggaaaattagacctctctttccccctccccgcccccccaagtatggctttggcagaaaaatcccaaagaaaattagaaagtggagattaagggtgaagatagggagagacattcaaaaacaccaccaccatttcatacctttggggctgagttctttagtcattcaacaagcatttcttgaccacattctatgtattggacaccgttttactgagcaagacaatttagaatgaggttgtgaacatgaacttggagctacctgggtttgtaatcccagttcagccacctactagctacgtgtccttgagccatctacttaaactatctgtgcctcctttctctcacttgttgaatggaaataataccattaagtccttcataaggtctctgtgaaatggaaataataatatttcttaccccatagggtcattgtgaggattaaattggttaatgcctgtgaagcacttagaaaaattcttggtacatattaactaccaagtacatattagctcttatttggtggtgatgttgtgttgctgtttaacatgaacgaatgtgccatgtgacattttgcgtaaatgatgatgaaagggaagaaacattaccccaaacctattagtgaaagactgggtagacatggtttttactcatgctccctcctgcagatagtaaattacttaggaagttgtttttgtcactttctactttggtccccaaacatcaagaacatggtttctttaaataattcttgaaaaattgttagaacaacaatgatatgggctatccataggaacatgtagaaagcatgtttgcaatcacctacctgaaaattagaattatcatcttgggtatgttaaattgaattaagtttggcccaaagctgcctccatccatattttaaggttggcctaacagcttctccacgcatagcaaactgtaacctaacctgatggttaaacagacagtagcctacgattgtaacaagtagccaagtctcagtcaatctgagcagttgagtttcagccaatcatggggaccaactgttcaacctgtgttcttaaaaggcgaacactgagctatcaccaattcagctgtttctgtacccacttctattttgtgtacgtcacttttctttttctgtctgtaaatattatccatgcagcagtcctggggttgctctgaatctattctggtttgggggtggggcggggtgggggggtgcccgattcatgagtcgttgtttgttcctacattctgttaaattgaacgtgtctaaagtttttctttgaacaggtagtgggactgagctactattcagaatattctctgtgccccactgtggctcgccatcataccttctgtatcttttgcttatcttcctgtcatgagactagcaaggtcttgacagcactcacctgaagccatcaatcaatcagctgaggaagacatcaatctctgtgattgtaaactactgagatcgggtagtttgtgtagtttgtggccttaatctagcccaccctgactgacacattgactctaaccaatgaccacctaacccattgttttatctttatttgatgccaggattgcctttttgttagttggttgactcttacaggaagagtagatgttcatgtattaaaaagtaaagcttggccaggtgcggtggctcacgcctgtaatcccagcactttgggaggccgaggtgggcggatcacgagttcaggagttcaagatcagcctggccaacatggtgaaaccctgtctctactaaaaatacaaaaattagctgggggtggtggcgcatgcctgtaatcctagctactcagcaggctgaggcaggaggattgcttgaacccgggaggcggaggttgcagtgagctgagatagcaccactgcactccagccagggtgacagaatgagagtctgtctcagaaaaaaaaaaaaaaaaaaaaaaggaaggcttacatcccaaataatttgtgtttccttagtaaattactatggatccgctacccatgcattcatctaagttcaccatcattttacttattcacttatttaacagaccttctgttagtaactagtttatattggacttgggtcttggttctgggggaagcaggtaagtggttcagaaatgcgtaaaacagggttcctgtcctcagcatgcttatcaagagtgcaaaaatctgttttaggtgacataaagttctagacacttatttgctgggcaaagtagagttgtgtcctacttgtaccactctgtttaaacttcaagcccttccccctagctaccaatattttatgagttggcattgacttagtggttactctaatttgtagtcttcacaagggttaaaatgtaaatcacatcttttgcaccttgacttttcagactaaacatgtgtgtttatttaaattaatctctcattgactgtcctcactatcttcataatgttagttaccccttatttggctatttaaacctcagtagtttttttctctttggggcagatatctagcttaagcaaatctctccagattttgacaccctgtgactttgttggtgagttttctctgtaatttttttattttttcaaaaaatatccagatgataaacactgtaaatatatttttgatttatgtcaatttctggccagaattttctagataataacttcagtcttctgttatttttccccttgtcattcactcatgcttgggattttatatgcactggggtctgggataagggagtaaaatttacttaactttgagcacattgtcactttttccagcatcttgggtatattacatatcttattaattgccaaatgactcctcttttaataagttctcaaatcttttagtagatctaagctcttaaacaaataaacccaatatttcttgtagacatggacaaatgaagttttgcatttcaaccaaagtaagagaatagtctttaaaacacatataaaataagaataataacaggaaatgttttctcttcctctagtgatcatattttcacttggaaagatttttttacatgaacagaaaaggaaagtaataatcttatttattttaattatcaaattaaccatcgttgatgacttataaaatactgctgttttaaaaaagagaattaaaaattaataaaagacaaaaatatttaatgttgatgtcttcaactatgaaatgcattaagagtttgctagttatatattagctgccatagattgactctctcgctaagcaccttacatggattacctgatttaatcttcataatccctttttcatcttcattacccctttttcatcttcattctcattgcagatgagaaaaccatagcataaagaggctagataggccgggagcagtggctcacgcctgtaatcccagcactttgggaggccaaggtgggtggatcacctgaggtcaggagtttgagaccaccctggccaacacggtgaaatcctgtttctactaaaaatacaaaaatcagccaggtgtgctggcatgcgcctgtaatcctagctactcgggaggctgagacaggagaattggcttgaacccgggaggcggaggttgtagtgagctgattgcgccagtgcactccagcctgggtgacagaatgagactccgtctcaaaaaaaaaaaaagaaggtagataatttccaagtccacatagatagaaagtgtgggagccatggcttcaaacttaggcaggctagctccaaattttgcacaagtcaccatggcctaatagtgtccaagctattctttacctttcctttttgtttttgttcttaatccaagactcagttaagataggaaagaagagatttgtttcaataggaattcaaatttcacatgctttgtagatgaacacaaggatcatttgcttcagattaatagaaatattttctctaaagttcagagggtttgtaggaggtggcttccaaattttcttgtctttcttgtctccacgatttacattgtttataaggtgttcaattatactacaaaggggccatacatttcttttggagatttaaaattatcgttgagggataatataagttgaccatgtccaggcctactttttgtttataaaagtcagaatacagttaggttactttagattttattcaatgagagagggtgtgagttagcagttctagattgtgccgtaattcaaaatgatcaataaatctttcctttctcaaaatactctgagcactttttatcactcattaaattaatatcgtgtaccaccctagactatatagctatagtcttatcttccctgacagattgtaaaatttggaggttacaggggatatctaattcattgctctggtgcctttcaaaattggaaagctgtaggagcccatcacgtttttgtttaagtggtgtatcagttatctattgctacaatcatgctgcagaacaaacatgccaaaaacctacgtgcattcaacaatgaatgtttatcattgttcacaccttatgcctcagctgggcaaattttctggtctcagcagagctcactcacgcaactgtggtcagctgaaggtgggtgagcagttctgttgatattggctgggctctctcacatgttggggccagctagcctaggacagcctcagctgggacacctggactaacctccatgtggtctctcatcctccaggatgctagcacagtcacgttcacatggaagtgacagagaaagtaagcagaaatgtgtacagcctctgcaggtcttaaagcttggaactggcacattgctatatcaactacatcctattggccaaagcaagtcataaggccagccctgattcaaagggtgggaaatagactttgtctcttaactggaagagattcaaactcacattacaaagggtgtgtgtacaaggagggctgaagagttggggttaattttggaatcaacctgccacaaatagaataaataaatagtgacgaccaaacctcaccgggtggccttagattatccctcatttccttactgtaggcacgagaagtggcgttgtggagtggaaagtgggaggggctggcattggttggcttagagttcccagtgttttcacggctgcctgaccatgaggcagtcatgtcatgtccttaatcacaacttctcacctccctaagatggtcatgagaattcaatgggacaatgcacattgaattgctttgtaaattataaaaaagcatctgtgaactatcactgctgttatttcatttgaggctggggagcctgcctgcaattccactaatttgacagattctgaaaagcatccgcagaggatgtgtaaatcccaataaacaacatttctttcactccactctgagattgggtctgaaaattgcatcctgagagtcagagaagattgtacatagtggtgcagggctgcaagacatcacgggagcctgttgtaaatatgaagaggttttaaatgtgctgctgtgacaccaccttctgcaagaacagacatttattcctgctctaggtgactcccataccagaggaaggtggcacactgaaaatctggacttctgcatttatttctgcttgaagaattaacaagctcttaaagtaaatatagtcccaggttctccccttccaggtttcgtgacatcacagtgctttggggccttccccctttactgctgcctgggctgctttccctgccctgtggaagtgagaaataggctcctatgacattgaaaagagcgcaatttggagtactagaatggatgcattttcccactcttgtggtgctctgtgattaaaatggagatgtcttttgcataaatggcttgtaaagagtttcttgcaaaccccagtggtctggctctgcttatgagtcaaatgtgaatgccaatatttaacacattgtgagaaatgacatttaggaaaaaaaagacccaaataattaaatatgtgtaggagacagcccacattgtttgaccatgtatactattagtcatcaactgatgcctctgagacagatctgtgggcatttactatgcccacgaacatgtgggatctaaaattaaaagacctagccaggacaagaaagacaccagagagaatttgttgcttcagatttgattcttcaaaagatttatcactgcaagtataaatcctaaactcaaaattaccttcaatgccattgcacattgtatgtacacaaatgggatactcagaccaacaacgtaggtctttcttggtgctaagaacccacatgctgtatgaaactcagcgtggcattcatttaaaaccaaaccctcaccaggtgcatgtacattgggatacagactcatacctgtaatcccaatactttgggaaatcaaggagggagaattgcttgagccaggagctggagaccaatctgggcagtaaagtgagccccccacctctacaaaaacatttaaaatttagcttggcatgatagtgtgtacctgtggtcctaggtagttgggaggctaaggcaggaggattgtttgagcccaggaggtggagactgcagtgagctgattatatcagctgcactctacctgggtgagacagtgagactctctctctctctctctctctccccctctctatatatatgaataaaattcctatatattcataaattcatatatatgactagaattctctctctgtgtatatatatatatatgtgtatatatatatgtgtgtgtgtgtgtatatatatatatacatatatatatatatacatatatatatacatatatatatatatacatatatatatacatatatatatatgtgaataaaaacataaaaactaaaactccaggtgaggattgtgctgattctgcacatgcaactgttaatcctttgaaatggtgctgtttcacttgccctgccttaagtcagctggaaaaaatggttggcttttgcttttctaatttgcaagccacatacctttttcctggccctgcacactgtctcatcttgcttaggaaaggggctagagattagaaggtggccttggaggggcaggcctttcctcttgaccgacttgggcgccatcaggctatcagcagaatggctgaggccaggttggcgggggatctggggtgatccgaaagcaggactatctggccaacagcagcagcagtgtggtggtaggaaagacagcactgtccttttttcattaagtatatttataaacatactgaacatgaaacatttttcctttcttcacagtgatggatgattatatgtctatgaaatgttttcatttatttggcgccagggtaatcaaaatcagttgaaactgtcccactgaaagcaaagaaaacaagtaggcgtgggacgcctgtgctccctccctcatgctcttcaaggggagtcgctggcagaagggctcgctttggagaggaacaagcccttcaactcctaattgctcccagtcctgctcatggctgccatccacggaggctgcagctctgcagagctttcaaagcaatcgcctccactctggaggcagtgtgagagcgtcggggccagcctgtgcgtgactctgtttaggctgagaaagagctggtcccagaaaacctttgtgaatgaaacgctcgtgctttcatgtctgctctggcctgtgttctgggtcagctgttgtgatctccaacatcctgtttaaactggtgttttccactacatacagacaaaactatttctattataagcttctaatggttgtgcagagaaaagcaaggggattaggtagggaagaagggttgacctgttgggagagaaacatagacagtagatacatgcctgattccttcttttgatggggttctttggacagctacagaacccagatctttgttttacaaatgtagcatcacttttgaaaggccacctttttggtgaggtttatctagcctaaaccatgggatgattttgctcacttgtggacatctctctctctgtggttttcagtgcagacctgtttatagatgagggttaaggccctcagagggtagaaaacaattttcctgatctccaaccatcacctttcaaggaattagtttgaatattggaggagagaagagacttccacttctcaaatagattcaagaactcttaaaagtgaattgagagaatttccttttatttgttttcttattaaaataagcagagatctaacggatgctttttaagcagagcagaaaggaatgaacctcccttcttggctcctcattaacatggcacagaagggcttggagaggatccttgggactcccccgctgggcactgaagttatgggcaaagactgacagtccatttgtctcatgtgaactagcgatacagtgaagagatcagatacatccttaacattcccaaagctcaatgaaatagtaggtatatggtaaattagaactaataacttatagtcaagttctgaattggatggactgaggtcaaactcatacaaggtattggaagaaggaagacttaaactggttggtaaccaccagtggccattctgcgagtaagtagccttgcgtggcaaaagagcttcatggatgtgataagaaccttgaaatggggagattggcttggactctctggatgggcccaatgtaatcacaagcatccttaaaagtggactcgagagacagaagcatcagtgtcagagtggcatgacatgagaaagactcaaccaccctttgctggctttgaagatggaggaggagtccacaagccaaataatgtgggcagcttctagaagctgaataaaacaagaaaatggattctgccttagagtctctggaaaggaatgcagccctgctgaccccttgactttagccccatgagattcatgtcaaatttctaatctgcagaactgtaagagaataaatttgttttgttttaagccactaagtttgtggttatttgttacagcagcaatagaaagtctaatacactgggaactacaccaggaaatttacctggttcattttttggaatctgtgcaaactggctaaatggcactttgcattttccagtcttcttaaagagtacaaaatgttgtggaatctgactgcttgagcctttaaaaaaaatccagaaaataagagcaatgtctcaaccattttgagtatatggaacttggtaacatagcaaggaaaatcaaaataaaagaaatcacctctaccaacagatcaaaaaaccattttgatttttgagtgtaaccttttagaacatactcatatctagttttaagaaaattataactgtatttgtagtgtaaaaatcactgtcctagataaacacactgtgcttattttatactttttagctaaagaaaattagtgacctatcctaaggttcttaaatttcggaatttggagttactgaactcttcatgataagaaggataattggttgatacatttcacctacaagggagaaaagatttttaacctctgcaccatgccagggcatgaaattagcatttgtaagtatgaaatttgaataaaagttacaacattaaaagtttatctgcctaatatagacacgggcatcttttctgtagggagcaaggagcaaagttgaccattgctccttgctaccaacacacctacccgttatttttgtaaattcccatttttagctgtgagcttgaatgtgcccaatttctaaaagtaacaaaggatgtaaatgtcaaataatagagcacattgtatccaatatttaaaatagctcctggaatgctgaggcagtttgaaaaagacaaacacaggggtgtcaaaaatttttctatgtttcatattatttttccataattaaaaattagctactatgattaaaaaataaatctgtagcacttataaaagaacacataagaaaaggattctttggtccaagagagattgagtaattcttgggatggtgaccctgatttcaaacgtttggcttttcaattacttggtgtaaaatctggtacttctctaagaaaggaactgattaattcagaaacaggcagcaaccagcttcctcccagagataagatgacatcaccccaaagtcccagacagtatggtaaatacaacttcaaaataggcaatcacattcactgaaatgaagtccctgcagccaaccacgatcacccatcctctatcatcccgcctcattaccttagccttcagtgtcaggatgagcaaagctgggggcatccggccaagtcttacacaaatccctaagatatcttttatctccgggttaatagatcatgttaaggatttcagtggcagaaacggatcctatggacaatttaactctgtgtctttctagctaatacttttccctcacagagccaactgattcatttagaagaagcctttttattttcatagagctttcttccatttcagttagaatcttatctaaagtgagaataaattctcaaatgtttaatatgaaccaaggagaaagaggagaaagccccttaaacagagttcagtttaatctgtagaattaattggttttgtttgcaagcaaattacatatttcaaaaattatatataagatatgtttaagtatatacatttatgatatatttcaaaaggagatcaactaccattcccacttggtcagttcccagtagactctgacttcatttctgccttagcttcttccgggcttggccatgtttgcacacacttccttccctcatctagcatccatcattctcactgtattcaatttcttaaaatatacacaagacctcatacactcgcacatgcacacagtcacctacactcaggacaagctatatcatttttgaggttttgtatagaataaagatgtgggttcctggtccaaaacttattgagaatttcaagatggtggccaaaacacattggaccaagctcaaggcccttttgagtgcaagatacccgcaggcccttgcaaggtccatgcccatgaagtccacgcccttactgcattagtagatgtcacagctacacatatgcactccctcacaggtacacagcagacagcattcttagagcaactgagcttctacttgttgctaaaatttcccttttagtccaatgacacacacacacacacacacacacacacacacacacacacacacacatatatagtcctttgatagtgaaaagctcttattttctaataagcacacaggctaagtgacttatccaaagttgcaccaaatatgtttttctttctttttttaacttttattttagattcaggattttttttctgattataagtaagtataatacagcaaatttgaaaaatataaagaaaaagacacatttacaacacataaaataccaccaattagggatgaccactatttgtttcagtatatgtcttctattcctctataagtttttatgcaataatttctatagattctttctttttttagatataaatttaaatcatattgcacatactgcttaatatccttttttcatgtagtaataccacacagaccttttctgtattattaagcattcgtatagagcactatggttaatagttaccttatattctagtatggttggtaaagaatcagtttaggaacaagtaaaaaaatcttagagaaaagatgacacaattagtactaattccttttcatatcataactctcttactttaggtaaagagaaagatattggggctccaagagtttaaataatttgctacaagacacacagccattaaaacaaagatagaatttgaacccaggtctgcatgatggcaaagccagcacagaatcattgtacgatgacagtgacaggtaatttataactttactcagcagaagggctctggggtcagcatagcatgcagagccttggagattttcaaggcctggcagtttccctgttattgggaaaaggcatccaggaaaacctatggaactgagagagaagtcagagtctcagatgcatagtgatgacaagtaatagtcaggaaccactgctgggccaaagaagtttcactccggaaatcatttcctagtgaatgggaattcttttggtcacagagagttgacttcccacattagggaaatctagcaaagatggttgtacgcttataaaagcaaatgcaagaatggggatgggttgacttccgccttttaaaaagcagcgtttgtgatgaagtcccaagtcatgtggctattggactgtgttcttaccctccaagtgagaattcaggacaattttagagaaaatagtctttttcttaatgttttcaggaaagatcacttgaaagggatttccctgatgtaatgtttttcaccttccatattcatccccctcctgtttaatcagctagtttcttactgatatcctgagtaccgggaccctagtacaaagggggactggaaaagactcctggcataggcattagatgaggggaattttatgatgagtaagggtagcctaccatgcctcatcttgactactaaagaatcccttaaaagggaaggcaatcgggggtgtcttcatttcctgtaggtactgtgacaaattacacaaacttggttgctcacaacaacagatatttattccctcacagtcctggatgccagacgtctgaagtcaaggtgttggcagagctgttctctcctaaaagcctcaaggggagaaggcttcttccctcttccaggctccggtggctccaagtgtcccttggcttatggctgcatcactccaatctctgcctcttcatgtgaccttctcctctgggtctgtgtcttttcctcttaccttgcttattaggacacttgtcattggatttaggggcctcctggataatccacaatgatctcgtctggaggtccttaacatagtgatatctgcaaagacccttttcccaaataaggtcacattcacaggttctggggcttaggacacaaacatatctttttcgtgcccactattcaacccattagagagcgggaaacttagaagttgatgtgtcccagggaaacgctgctgagccctcctgggtgtagaccttgggcagggccttctttcctggataaaactctggaaaggaagaaagggcttacactcggggctgtttgggttacaaaggtagacaggtctctgagtgcttcttagttctttatacagcagaatgacatctgtcagttccagaggggcatcaaggtagttgagggagagaaatccaggcctaaaggggcctggcagatgggaccactcacctgtgtggcaaagaagatgtagggtcaggtggggtgaatgccccctcagcaggttcctgcctggaaatagagggttactgaagacctgggcctcactttcccagcccatgtcttggcatggcatagccttgggactgggcatctactctgggctagagggcattgccaaactggaggagatgagttttgagtttcatggaaagaatagagagtcaaaatagaaattggtgatgttacctttctaactatactagagttcttcagagacacagaaccatcagaaaatcacatacacacagaaaatcacatacacattgaaatgacagtttggtcaatgatgcatctcatatacgacagtggccccataacatacagtggagctgaaaaattcctatcatctagtgacaccatagccattgtagcatcatagcagaatgcattgctcacgtgtttgtggtgatgctggtgtaaacaaatatgtttaataactgtagtatagcccaagtgcacagtatttgtaaagtctacagtattgcacagtaatgtcctaggccttccccttcactcaccactcactgattgatgcagaggaactgccagtcctactagcaccattcatggtaattgccctatacaggtgtgccctttcaccccgccctttttttttttttttttttttttttttgaaacagaatcttgctctgttgcccaggctggaatgcattggtgtgatctcggctcactgtaacctctgcctcccaggttcaagtgattctcctgcctcagcctcctgagtagctgggactataggcgcccgccaccacatccggctaatttttttttttttttgtatttttaataaagacggggtttcaccatgttttgccatggtgttttgccatcgagaccaggatggtctcgatctcctgaccttgtgatctgcctgcctcggcctccaaaagtgctgggattaaatacttaccattgtgttgcaattgcctctagtattcagtagtgtaacgtgctgtacagttttgtccccccccaggagcaatagatcatctagcctgagtgtgtcgcatgctatgtcatctacaacactttgtggtgttaatgtgatgacaaaatcacctaatgacacattcctcggaaagtatccctctcgttaggccgtatatgaccatgtatctatagacttgacagacccacaactaacactctctcttgtggacctggcaggtctgaagtctgtaggtccagctccgaggctgtaaattcaggtgggagttgaggttgcgttcttgagtccaattctacaatgcagcaggatggaaactcaagcagggcttctaaggtgtagtctaaaggagaattccttcttcttcgggatcctcaggcttctctcctaaggccttcgtcttagaagagattggcacccacccatattatggaggataatctactttacttaaagtctactgattgtaaatgttaattacatctatacaataccttcttcacagcaacatctagactggtgtttgaccaaacaactaggcacagtagtctagccaagctgacacataaagttgtcacacctgcacactgcagtgcataatggggtttaaattcagacttgtttctgagcacctaataagtgccaagcatggtgctatgtgtgctggagacgtgagagtggatgccttgcttctgttagcaaggagtcttcagttggaccaaatcacaggggaggtcacagcatctctaagtgagtaaaggctgtcgaaagaatgtggagaaagacttcaattgtcagcccaaagaatctgggctaaattccccagatctggagaaagataggtgagagccagagaaagtagggaggcaggggaaggaggagcatcccaggcagagaggaagcctaaagtaaaacaacaacaacagcaacaacaacaacaacaaacccccatgagcttaagaagctgaaataaattcctgatgggtagaaaacagaatgttagaaggtgaaggttatgggcgtgaacagatgcggccagagggctgtgcttgggtgctgactgtcctgtgcctcctctgagatgttgcagaagtcaggccttagtttgagagcactggggagccaccaaaggctgtttagctggagagtggcatgatcagacttgccttttcagaagagcgctctgatattttgtgcagctctgctattggaggtggaggtcaggacctgggcagttgaagaatccctgtgagaatggccagagttaggataatgagaggggcagaaagcacaatacacttaagagtgcaaatcaatgcagatggtcttcattccatttacagatcactgctggggtctgtgtagatcaacaggcagaaacaaactttcaaatttgtcatcctacctggggatggaattgacacccttacacgtgcgtagcatctctaattgtctttctaccagccttccttctcttctccccatctatagttctggttagatttagtgatcatcgtttctcaaatgcttgatgtctaatccagagcaaagtaattctgttctttttaagcacttcttgtgaattagttagtcaccaaaagggaggaaaggtagacgatcatgtcaatgcaaactgttctgcattcttgaatctttgcagggctgctcacagctccaggagaaccccttccccacctcaccccacccacagatgctagaatcttccctgcttacccctcttcagcagcccctcgtctttcattgagaagatgaaaattggaatgaattgtaattgaatgttattcaacctttccatattaaagtgaacatgagatcaaattgtcgtttttcccaaactttatgtcattttgtattagattactttcctcatgccaggacctagagctcatatgaatccaaaatggaaggaatctttaaattttgccaagtctataatgtgaagaaaaaagaaaaagacctaagtgaggtgtatgtgaacgtgaatgaaaactccagctttgccttggcatcaggttgaaatgagctcagcccacacttggcatttgggctgctcatgtcctgaactacacctcccaattctgtgaattctaccaaaccagaaacatgatttgccagatgcttcccccactcactcccaatgtgtgttctttgtatgaaatggaatccatatgtttcttacgcatttacacttaaatcatcaagatgttactcagtgatgcctctgtgatttatagatctttcagtctttttttatttgaaaaaggaaaatcatattttgtaaagtgtagacttgaaaccacaaatttgtacaatgaagaaaaatatacatctgctgttttctttctttttgcttccaagcttcaaagggggtattgccaacttgcaaacacatgacttaccagaagcatctacaccagccgtgtgggcctgagtctccagctctgtcttattactgccattgtcccatgtcatgggagatgtgtgtgtgtattagtttgttttcactctgctatgaagaaataaccaagactgggtaatttataaaggaacgaggtttaattgactcagttctgcatggctggggaggcctcaggagacttacaataatggtggaaggggagcaaatacgtccttcttcacaaggtagcaggagaaagaaatgcagagcaaaggggaggaaaaccccttataaaaccatcagacctcgtgagactcactcactatcacaagaacagtatgggggaactgcccccatgatccaatcgcctcccacaaggtcccttccccaacacgtgggcactacaattcgtattaaaattcaagatgaatctgggaattggggctcatgcctgtaatcccagcactttgggaggctgaggcaggtatatcacctgaggtcaggagtttgagaccagcctggccaacatggccaaaccccgtttctactaaaaatacaaaaattagctcagcatggtggtgcatgtctgtggtcccagctatctgggaggctgaggcacaagagtagcttgaacctgggaggtggatgttgcagtatgccgagatggctccagcctgggcaacagagtgagactctgctcaaaaaaaaaaaaaaaaaaaaaaattcaagatgagatttgggtggggacacagagccagaccatatcagtgtgtgtgtgttggggagagcaggatagagaaagggagaggaaaaggaagaaattgataagaaggaggaaaaggagggaagatagtaacaatgtttccaagtaacaatggaaagtggaagagaagaattaaaaattttggaacgtgtagaaaattgatatattcaaaggtagaggaaaagaaaacatccttgtcaggaacagcataaggtggccaagtatttaatcacccactcattagaaagatatttgcatagtgacatctacgtactagagtgtggcacaataaagatggatgcaaattatctgacagtcttttgatggttgtctgctgtggtttggaaatgtttcccctcaaacctcatgctgaaattcaatctccagtgttggatgcagtggggtctaataggagacgtttgcatcatgagggcatatccttcaggaatagattaataccctctttcttcaggggtgagtgagtcctcacttcattagttccctcaagagctggttgtaaaaagaacctgatgcctccccaccattcttcttctcttgccatgtgatctctgcacacaactgctctccttcaccttgacccatgactggaagaagcctgaggccctcaccagttgcagatgcccgatcttgaactttccagccagccagaattgtgacccaaataaaccctttttcttgataaattatccagcctcaggtatacctttatagcaacacaaaatgcactaagacactatactatttctcttccacttgaatcttagctggcctggggctactttgaccaatggagtttggtgaacgtgatgctatgccattctggacttagtctttaagaggactggtaccttttgcttgggctttggcctctgaatcaggctgtcatgctgaggccatgtgtaggcctagtcaacaagcccatctatgctcccagatgacggcgtcagctgccagctttgtgagtgcgccatattggatgtccaccccattcaagccttaagatgtagagattgcattagcatcttattacccacttctctgaagctcaaacatggcttttctggaaaatctttgtaacattagtgatcagaagtattttgcttatagtctggatttcttaaaatgaaacttcggaagtttcgtgtcatcatcggcatgcataaatgacgtacatttttccaggctgttagtcttttccttttaatgactccatgtccaagtaacaatcattctcttcttagaaactcttctcatttgcactaaagtgattctattcaagagagctttgccaatatattttaatataacccttacacttaatatctaactagtatgtatctgtctgtttacctgcttattcatccatctcatgtctcaaatttcaaatacatctcctatatatatatgtgtgtgtgtgtgtgtatatatatatatatataaaatacacatatgtacatattcacacctcatattttaatttcatagtttcttgaatggattaatggattcagttatttttgcctttcattaatttttctggaaactagctttgttttgttctccagattccttttctttgactttgatataaatctagagaaaagttaccagtgacttattaaatattgacatcccccacctacattgattcctatacttttctttcttcccgctaatttttgagggataatgataatgcctgccattttttagtattagtatgtgccagaatgtaggctaatgtcatcacaaagttatctctttcaattctcctaacaacccttagaggcagatattatttttctcattttacagtttgggaagctgagacttagagaaattcagatacttgctcagggtcacatagataaagttagaaccacgatttgaatccagatttatcttgtgagatcataatatcctgccttcctgtcttcttatgtatactgactcacacaaaggaatttatttggtcattcatccagtcgtctcagaaattcctcagtcatcttctgtattgcatagtttagctaagctatattagatgaagggccaataaaaataaataagacatgttcatgttcgcaaggagcttttctgagcaagaatctgagccttgtttaattttatcaataaaatgggattctatatatttcttgcaatctttaatgtatgaatcaggataagctgtgttatgatgcagtaacaagcaacctcatgatttcaatgatttaaaacaaggttaatttattgcccatgctatttatctcctgaggcttaggaaggaattctgttccatgttgttctcattttcaccctaaaatgcaggacagtttagaccagtaatggtcacagtggcagaagaaaataactctgggggtctcaatggggggctgatatagtttggatttgtgtccccacccaaatctcatgttgaaatgtaatccccaatgctagaggtgggggctgggtgggaggtgattgggtcatgggggtggtttctcatgagtggtttagtaccagtactattgttgcgagtgagttctcatgagctctgggttgtttaaaagtgtgtagtacctcccccctctatctttctcctgctctggctgtaagacacacctgctgcccctctgcctttcaccaagattgtaagtttcctgaggcctccccagaagcagaagctgttatgcttcctgtacagcttgcagaaccatgagccaattaaacctcttttctttatcaattaccaagtctcaggtatttctttatagcaatgagataactgctaatacaggcactttacttatactcacaatgcattggccagagcaagttgtatcccaccacagaggagccaggatggggaatcctctagaaggtggaagtgccagaagaaggaagaaccagaatatctggaaaccagcactaaggactaccatatatatgataatttaagaatttatagtccaatatatggaaaaactttaaaaacagaaaacattttgtgcctgaaatattatcagtggcatgaaattctatggggaaatttgataattctgagattttttttcacattccttctttcaggctatgttaaaggggcaaaaaaggatatttactagaaaggttattatgagtcctttattttttgctttttcaatctatcagacactgcttcagctaacagctctgaaggaccagccagaggtggacaaaacctgctatcaataacaaaacgaaaagctgagtagagtatgcacacatacacacacacacacacacacacacacacacacaatctgagtaaagactcactaaaatggactagatttgagggttcagtatcttaaagagaaagcctgctcattgagggaaagagaaacctgccattctatgctgattttcccctaaggctttttcctgtccatatcctgggcaaagaggctgagcaagtgagtcaggaataactcagtggcaaagaggaagagactctgagcagagcttttgtgagtctcgtggccccagggagacaaaaattgatgttcagccctgctaaggcaaccaggacttgaggggccaaaattccaaaggaaagggaagcagagagaaatgagaccaacaccctgagctgcttttctcgtaaagtttttggttgattattaaattgttcctgctgaaaggtagataaactgagtagaaatcagttgctaagaggccaaaaacttgatgcagaattcttggatatctcatgatactgcagtgaaaaaaatgtggttcaaagcctgccaaaggagaagagcctagttattaacccagctgaaacccgtgaagtacagtcagacctccctaatggtgggttctgcgtctatggattaaaccaatttaggactgaaaatactcaggggagaaaaaaaggtggttgtttgtattgcatatgtactgacctttttttcttgtcattatttcctaaacaataggctataacaactaactacatagcatttacattgcattagaatttataagtaatctagagatgattatatatataagaggatatgtgtgggttatatgaaaacactataccattttacaaaagggacctgagcatctgtggattttggtatttgcttggggccctagaaccaattctccgtggttactaagggctgattgtactatatttcaggaataagggcaagccagaaattagataaagccttgtaagactaaaatccaatttgaaaccagctcaatttctgattggattaagggatctgcctcaagaagacaaagaaaatcctttttgaaattacataaaataattcagaaattttacatgatttttcatagtgtttaggatttaataaacagtaccaggcatatcaacaaacaaaaccaagaaagaagaaaaaaaatgaaaattacaatatctgatttaaccgtgtcacatatgtgattactaggggatcacacagctggagagcagatttgttgtttagaatgtaggccagtaaaaaattttcaagctgaggcagagaggaaagacttctatgcaacaaactatgaaatgcttttgtgggaaagtaaaaagaacataaaaaagaaaaataaacacaagaaaataaataaataatttccatgaattagaatattacaaaaatagtaactttccctaaattgaacttttgattcaatgaagtctaaatgagaatcactacaagtttgtatttttgtgtgtggaaattgagtagctgatatttaaaaatgtaggcagaaatgcagaggatcaataagagccttgtttatctccaagaacaaagtcggaggatttaaatgaccagatttgaagctgtgatatcagtacaaaggtactgggtaagttagtataactgcttttgggaaaatagatcaatggcaagaaagaaaaaaaagataagagaaaaaaagagaaacaaaaacatccagtgggaaaagaatgatttttaaatattcataaggacagccacattgaaaaaaaatgaatttcaaccctagctcactccatacacaaaaattaaatgtagatgggttgtagatctacatgtgaaaggttaaattaaaaagcttctagaggatacacaagataatgttcattgccttcatgagctaggcaaaggtccttaactaggacacaagaagcattagtcattaagaaaatttgatgaattgaatcacattaaaatgaagaatttctgtttatcacactgacaccattaagtgggtgaaagtgcatgtcacagagtgagagtgacaagggactcatgacaaatcactaagaaaaagacagacatccaaataggaaaatgggcaaaaacgttaaacaggcagtcagaaaaagaagctatttaattggccgataagcaggtgcaaagatgctcaacatcaactgagtaaggcaaatgcaaattaaaattaatagtggaactgcatcactcatctgccagaatgactaagacaaacaaaacttacagcactagtcagtgttactgaggaatgctcactttcctacagtgtggtgggagtgtaaattagtactatcatttttgacaaaatgagtgggagtatttactgaagttacacatacacataaactttgactagaaattgcactctcagtttatacattactgaatcgcagatatgtgcagtaaatgtcatgtgtaaaatattcatagcagtactattctgaacagccccaaatctccatgaaaaatagaatgaattgtgtatttatacaatgggatgccacatagcaatgaaaatggataaatgaattcttactacacacaaagtgaatgaatatcacaaatcaagtattgagagaaaaaggcagttgcaataaaaagcacggactctgtgattccattcatatgaagttcaactggaggcaaagttaatctgtagtgaaaatagtcaggttggctgttatctttggggagtagagggaggtagatgggagggacacaaggggagttttggggtgctgataatatttcatttccttatttgtagggtggttatgtaagtctgttcattttctgaaaatgaaccaatcctgagagttagaatcagaagtgttaaacttcagtaaaaatgctcacttaaaaacactaaaaattctataggacaaatttgtctaacaattgaaaagcattattcttgtcaaataatttttaccatgctggatcttgagtgagaattcaattttagtgtggtaacatctttttgcaagataaagagcataagatgctgactgagctgtcttctatgatgtaactaataacatgtcagaaaaacatgcctaataaaacaatacttatgattattttgcatttacattttgatttagctctttgttacatataaatacagaaactagataagataaatttctgggctttaaagggaagttggaacaaggggatcaatttgttaaaattgttttcattatgtttctgtattttattatataataaaataataataaggaaattaattcttcataattttataacatatcagtgctgaaagcacgcagtctcattttaatttttctcctttttattcagaaacattgatgctattcactgttgtttcatccccacaataaccgtgtaaagtggaattggaatgaatgactccttttgaaaggtgaaaaaactgtgatgcaggggacattaacctactattccaaaattacacttctagtgcagtgcagaccaagggccagatgcacattttgtaacattgattaaggtctgttttttctaccaagttcaccttcgcctccgctaccttgattttggttaagaaaacttaggatcgtcaatttctagtcaactctggcagagctagaacactgcaaaaaggaaacttgtgtgataggacaaagctgggttgaaatggctggagatctgtattcaggcagggttgggtctacaaccaaactataaggcaagaaatagaaaaaggatagtcaccccaccaaagttttattgactttttaaaacacagaaaatgagaaataggtagaacaagatactgacaatgtagtctcaagatggcacatcgatttcttaaaaggttccattgtttcataaaaccaaaacttaaaatctcctactatgtctctacttctctcctaaaatccagtttttctgagttattcctagcagtgctgccttgtgaaaatgttggttttatgaggagcacaagaaggagaaagattatatgaaggaaacctcaactctgaacagaaactcaagccggctatcaaagatctctcagatgctcaactgcatgaccccgtgactattctcaaaaagccttgacttactgtctttgcacagatccaaactcctaattccccatctgtccatttcagagctccctgcctaccctttaaaacggatggaaaatcacgtgattgtaaatcacattctcatttgcattcaatgacttggtgaccacaagataaactggttgggatgttttgggttcattcttgggatactttgggttcattctgcatgggtgcaaaaaatactttgaccagttaggactcccttcccctttttcctgacccaaagggtctttttttttttttttttttttttctgatttttagttcttattgtcacccatttgctccagagactggaactaatctattatcctgtctctaatacctgttattttcccactagtttccatctcagggattggcatttttgtccggaacccaggatctttccctcctacatattctttctaacttctgtcctctttccacctttttgaagagcctcaggggtggggactgcatgcacaatcatgtaagctcttgctaggttctgacctcataagtggacccagagatgactcccattgaaatcctctgccagaatcctgatataattttgttatcttccataaagtttgggggtagatggttttacctttggtgcaacagatggtttgtgtcgtgaaggacccaggctgtttctattcttttttctctgtgatcttcgaccagttggctttttctcttcatacttgtcacctcacagtcataagatgcctgatgtagctccagatgacggattcttattccagctatccaagcaggaaggaagaaactgacacaaaaggcattttcctaagctggcttttgattcaaaaagtgaagccctttttgtttcattgtggagaactaagacatgttctcatctcttgttaatcactggtgaaggagattaggatttccatggctggttctggccaagcaggatctatcctgacttcagcatgggcctagttcctggggatgaaaggacttctctttaacatttggaatacaaaattgggaggtaactgctatgaggtaaacatggaaccattaaaccaatctaaagttgggctttgcactcaggaactctgctcctagaaggtaggttcaactctccatatgcttatttgcccttggctacttcccactgttaagtacaaaataaacactgaatgcatgcatgcatcatgcatgaacgagtggacacgagtgagtcaacgcatggatgtatgagtgattgcatgaatgcttttctcccttgcttttgtcagacttaccagaaccttcctgtttattcccctctgtggaggggctactttgagttttattgtcacatctgctcatgtattttatcattctgccttctctatttataattgtaaactcttgcacttccagaaagcctgtctctctcgtgttcctttttctgaggcaggctactcctcatcaagtcccttccctttcttcactgctcctccccctcagcagtgttctcctagctggtctgcctgccactagtttaacgcttatttttaaaagtcatgtttattaaagtgtaacttaagtatgttaaaatacacttatttaagtgtagagttggatgagctttgacaaacagctgtgaaattatcactgcaaacttgatacagatcatcttcaccaccaccaaagtctccctttgctccctccagcttcttggtagtcaatcctctcctactgccactggcacttgaggaccactaatctgatatctgttcccatatctttgccttttccataatgtccataacatagtaaggagcctttcaaatctaccttctttcacctagcataatgcagtgagactcatcgatgttgtaacatgtatcagtaattgtttctttttaattattgagtattccattgtatggatataccacaacttgtttattgatttaccagctgatggacatctgtatcatttctagtttttgactattatacataatggtgctataaacatttaccaacaagtctttgtgttgacatatttttatttctcttgggtacccatctaagagtggaatagctgggtcatgtggtaagtctacatttgtctttttaggaaaaggccaagctgtttgcaaactggatattccattttctatttccatcagaaaatttgggggttccagtttttctacattcttttcaacacttgtatttgtctgtcttttttatttcagctgtcttactggatatgatgtagtatttcactgtagttttattttgtgttttcctaatgatcctgatcatctttttatgttcctgcacatcctctttggtgaaacgtctgttcaaatctcttgcctatttttaaattgggctatttgtcttctaattatgagctgtaagaattacttatacattctgaacacaattcttgtatcaaagatgtgatttaaaaatatgttctttcaatctgtggcatgtccttctatattcttttctctctctctctctctctctctctctctctctctctttctcttcagagatagggtcttgctctgttttccaggctggagtgcagtggtacgatcagagctcactgtagcctcaacctcctgggttaacatgatcctcctgcctcagcttcctgagtacgtaggactataagcaggcactaccatacccagtgaaaattttttaatttgaaaagaatttatttgaaataaagtataacaaagatttatttgtacatttcaccaagagttggttgcattttcaactccttttccctaaaactagatgactttaatgtaggtagtttctttttaatttaatttaatttaacttaatttaatttaataaagttccaggatacctgtgcaggacaggtaggtttgttacataggtaaacatgtgccatggtagtttgctgcacctatcaacccatcacctaagtattaagccccacatgcattagctatttatcctgatgttcttcctccctctgcccccacaacaggccccactgtgtgctgttcccctccccgtgtccatgtgttctcattgttcagttcgcacttataagtgagaacatgcagtgtttagtttctgttcttgtgttagtttgttgaggataatggcttccagctccatccgtgtccctgctccatctggggacatccatgtccctacaggataaatagctaatgcattgttcctttttatggctgcatagtattccatggtgtatatgtaccacattttctttatgcagtctatcatcgatgggcatttgatacttgattaatttttcaacttcttgtagagatgagatctcactatgttaatcaggctggtcttgaactcctggcctcaagtgatcctcctgcgttgtctcccaaagctctgagattacaggcatgaaccattgttcaggccccttctatttccttgtgttgccttttgaaaaagaaaagtttaaagttttgatgggaagagaaggtactggctgggtatttcttcctctctctccacttgagtggcagctctagccagggctgcttctaccccgtggttccaatccatgggctctataaactagattgtttcccttttctcctccaatctcaggctggagtgactcctttatgctcatctctgggcagtctggtctttcccttgaatgtccacttctttcagcaattctgcagttctgagtgacataatactgctgccagatataacatcttaaaacccctgttagcgtctctcttttgcaatattcatcatgtctaatttttttataagcccctaaaggcccttagtaatctaactctagataaaccactatattgttcttttgcacaccttctcctaccatgaaatactcttacctttagtgtaatgcataacccacataaacttgctctcctcttctagactgtggtttagttccacgatggcaggagtcatctgcaactcctgtttttctatctccagatagcagttccatacatctatgatttgcatcatacaacaggagcctactgctcaccagaagggaatgtttagtgataacagtgtaagaaatgtcaaggtatgtccaagtgaagaaaaggccatttgtagactcaatcttgttggccagtggcttatccaccaggaggagtttaagacagtccttctattgtcagagcacaggttgctgctgtgggcagaaatatctgcagggagtgtatgctcagagcaaagtgtggcatgtgatgtcaacaccatgtgaagcttctttgctattcttgcttcatctaccttcttcccccaccctctgcccacctgacccctacacatattcacacataaacacacacatgcacgcatacacacagtttttctcttctctacctagaaattgctatttacttgctagggtctgaatgcttgtgtacctgcaaaattcatgtgttgaaatcctaagtctcaaggtgatggtattaggaggcagggcctttgggaagacactcggtgtattaggctgttcttgtgttggtataaaaaatacctgaggctgggtaattcataaagaaaagaggtttaattggcttatggttttgcaggctgtacagaagcatggtgctggcatcggctcagcttctggtgaggcctcaaagagcttttattcatggtggaagatgaagcgggagcagcatgtcacctcatgagagcaggagcaaaagagagaggagggagatgccacacacttttgaacaaccagatattgtgtgaactctgtcatcaccaaagggatgggctaagccatttataaggatccactcccatgatgcaaacacctcctaccaggccccacttccaacatcagggatcacatttcaacatgagatttggaggaaacaaatatccaaactatatcaccaagacatgaaggaagagctctgaagttagtgctcttaaaagagatcccagagagagccttgcttcttcgaccatgtgaagacacagcaagaaggcaccatttatgaaccaggacataaaccctcaccagacaaacatcctggtgccttgatcttggactttccaggctccagaaccatgataaataaatttctggggtttaaaatttacccagtttgtggtcttttgctatagcatcctggactaagatgttactcctgaaaattcagactactatgttattccctctgagaaggttccgctaagcataattaatagttccttctgggttcctatgagaatgtgggcatattccttacaggcacttagcacactgaatgtaattagctgtgtgtctgtctccctcactagacagacagtttggttttttaggggtgagaccaccacgtcgcataccttttcatcttcagagctggcacagaaggatcttagcacatatttgctgagtgaatgcaatccctttcagtctgatgtattttcatgcagagatgtggtggaaaaaaatgtgtaaaacctgaacttggttctgtactgattattatctaatttctgtagaaatgtgaggtgaaccaggtcataacagcccatttcaatgtatcttttggacaagggaaacaatttcccaaccatttgcagcttgttctattgtttccattagtcatacaaaccttccctcacccttcaacataagcatgtcaagatagctgccctccaaattttattttgagcaaatgtcttatttttagagctttatgcaatcatataaaatcctttaatttagaaattctggctacactgggcacactgcctagtagccatgctctgcaaggagcagtaaaaaaataaaaataaagaaattctgcattctagaaaactcctccccatagctaaaataaatataaatttgaataacattttcagacttatctttctacagtcctacttcactgcttccttgagttctctgttacccattgcaatgcctaccaaagtttcttgatgttcaactaaatcttcatgctcataaattatcacttgatattcaactcttagaggatacagaacaggagacacagtttgctagcctagtggcattcagcattcctgttagttgaagttcttgcaacagtcgtctacacagcagggagatgaatccacattggctcccatgaaatttaccctggcttccaagctctataccagcatatcttgcaagatctccagaggtataactccttctacgatccacttaaggattataagagtcaccacactcttataattcttctttagggaaatctcaaaacagggtaccctaattgggttcatttgtagtcttccccagtgcagatgtgagctacccatcagggttatttttatgctaatgaatgtcacccaggagtacagctaacatcatatcaggtaccaggagaacacagctaatcaaaggatgaattctgacacagaaggtgagaaggtttagttggttaaccctttgcccacatccatatcaggtaaaaaacaaatttagcacagcattcaagagcatccacagccacaggtccaggaggctttctgggtttattcaccctcccccctcatcttaagcatcagttacatctaatgtctcaaccctatctggaaacacattgctcatatgtcttacctcaaaggctttcctacttataaagtttcctcctctgccattttcactctctctctttttcaactcatatttccttgtgaagctcctaaccatatgtgacccacttctgctaaatgttctctgaaatgactccctagacacagttagtcattctcatacatctgcccccaatgacctttatttacaccattatttaaaatgaaaaaaagacaggaggaaagaaactagatgttatcaccttgaattttagtgatttttttctttatctttgaatcccatacgtagcagagtgtgagcatgtggtcagtaccctacaaatattgttgagaatgtcttggaatcatatggatcccaataatctcctagaaaatctatgaaccattttaaaggtaaaacagccctggttcacaatgtttcataaatgtttacaataatagcgagtacttctggagtgcttaatttctggccacagtttatattttcttggttaatccttggcatacccctatgagatatgcaccgttacaggctccattcaactgataaggacacttaggttcagagatgttgagtgatttgtccatgatcacacagctgtcagaagtggagctgggactccaacccagggaggacgtctacagagcctagttcacacatctctgttcttccatccttaaaccttgtagaatgcagtggaggagcaaggcaagctgcgggccatggggattctttattctgattatctgaaaagaccaaagagtttagactgctcactgggcttcccttctccccactgtccatggagaacaatgtcaaggtcagctttaaatttcaccacgtatggtctcattggaacaactgatgagtagaatagtccatttattgtcttatttgagaactctgtagagattagttttataacattagtaaaatacacctcaacattttgactttttgcctcaaagatcattttaacaatttgagtcactgtgatgggagtttaatatttttaagcagcatattgacaagtgtttcatacacaaagaagccaagacagaattgaagcttacagtgtcagggagatagtttgcctactgttaatatttgtgtcattgggtttgtaactttacatatgatcacaaacgttatgttacatattaacataaacatcctcaatattcaaatctatctgtgtttcatttgcatggtgtaagagtgatagcatctgtcacttaaagaggttgcctaacagtctttaatccaaaatagaaatgtgtgagattttatccttttctttgatgctttgtaattatacaagttatattttatccaagtttatatccatcaatttttatctaagtttatatccatcaggtacatcaaaataaaaatattttaattacctcttgaaataatttgtccaagtcaataagtggcatgaattacatcactgaggccataacaaggatacacaaacatggcagaatcacacagattgtttgtctacacaaacaagatggtagaatccatcctgttactgagacttttccagaaaagcctattatttctgcaagcagatgtggtttaatcttatttgaatggtatttttgatataatgtgcctgggaattaggtaatgaaattggctgtgtgcattcatgtgttcatttgttcaggcatgtatagagccttctgtagtgagctttattctgcaggatagactataatggtactttcttcattgctacagtcttggcttgcaatgcttttttcttgctgacctaaaacccatctctagacctaaggaaatttattttctaacaccttgagatagtaatatgctgtgtgtggaggagataagatcatcacttaaataaaagctaacactgagactttctcctccctggccatctgcacattggacaatacctgactccaacctaaaataatcaactccagagttatacttaatgcctctggcaggcctgcctattgccagagagttttgggcctaggaataaaggcaacaaggattggccatttctggaggtaggaagcaaatggaaactcataattttcagatggctctgcatctttggggtaagaactggatgtttggggtgttttatagactatatttatttgtccatctatagctccctaccctccatctccctctctctctctcttcctctcacccctcccatctattatttatctcattttaggtcattcttaacatagctgtagaaaaagtaaaccttctggtgtgttttaattctggatccctcagggtgacctttggtctttgggaactgtggtttatgctggtgctgagggtggccatgcagctgtggagacagggagggatagagggggtgtaaatgcactttatcttcatggcactccatcttgtgactcctggcatgtcacagtgtgtactgcggtcccatggactcaactgggcttttataaataatttgcattgttcatttagttgcagtttaaactacaatatatggaggtttaaagaaaaatcaagttaccactggggtgttttgctctgtttgcaaataaacctctcttcctatatagaggaatataaaaacttaacccaataatatgatataaagaaaaaactgtagccaatatgtttgggttagattaaataaacaagtgtgcttattacacttttactatttttttttttgtggttttattataaagtaagaaatcccctatcacaaataataccttatttttatagactcctatcctagggctgtcaaagagcttaattccagggatgaaacttcattctcacaggactcacctggggaaaatgtatatttaggccttttaatctccatgtctcaaagcataaaactagtgatgccatagattagctcctcctttccctgaaatgcaacatgcactgtacatgcatgcgctgtactgtaaaggagcatcacatgcatgtagagtgtgcagggaagacaggaaatgaaaatgcatctccctgagctgtagttggtttaggtaagagtttatggaaaatacgattattgactggtatgtatttcaatgtgtgttaggtggagttgctcatggactcttagagttgaagtggaacagacaggtctcccagctctccagctctgttaaacaagagaaagatgcttgtgatgcctcagctcaactgtaatgaggtcaactcctatcactgccgtttcatctcagtgttgattcagaacgcttccagttaagtccaacgcccaaatcatcctcacaaattccgttaagccacagctccctcatcttactctacaccccctcagaggtttattctcattccacccactcttaatttcccgcggtcctcccagaacttcggttcctccatttgctttcagtccatctggatccacctggctttacttccctctttatccagcccggcctccttggttgccagggtttgtcagttctcactggtaatctctctccctccttgtctacttgtcattcagagctggcaaaattccacctgggaacccatacatcattggccttctccactctcaagcctgggggctgagcccagctggagaaaatcactaagatccttcaaccagtcccaccaggaagctcccgcggctgttccaagctcttgcctctctcccatgctctgcttcactgtcctcctgtctcacagcagattgtccggcctcagcttcctgcctcaaatgcccagatgaatgcatctgtacccagacccgtttttaattcctgctccttatttcctctctctcctgccaatcccatcagccatgctctgacctgctttctctcctgcttcctccagaccttgttccctcaaccctcttccctctctgcagtatcctcatctccctctctactaggccttccccttagcatagaagcacacttacatgtttcctctgtgtacaaataaacatagcaatgagttttagaaaatgttccgttcaacacgcttttcttgacgttctcaatttcattgatttccaattcccccaactccaggcacactctcctagggccacaccctgcatattacctggaattcttccttctctgccaggatccctctcactgcccataatattgtgttatcttttgtcatcattctgtgtgcctactacacctgttctttgatctcttaggggctccgattgctccatttccttgttgccttcattcctattgcttagtggcctggatctcatggctcttgccttgaagccatgaagctcatggcttcagcctctgtctgtctacatcttctttcccattctcatttttccaccacactcactggtaaactccatccctggattaatacaaccatccacccttcctacacctggactactggtgaagctcacataccatgagggttggtgccctatgcagctatagcctccagcttgaactggaagctcagctatatcccactctccttccacaggtcccataataccttcctcttccattcccctaaatcattgtttctctacagtcttcaaatcccccttggaactatctcttctctttcttttagggggtgacaggtcttcttaatactccaattaatgaaaactgactcaaagtgacaccttcagtgctctgtctcaagcactggttacagatggacctactctcagagccctgaaatttccatggaaaaagtgatacccacttctcacagctaatgttcccacatggactccagttcctatcccctacttgcatccttcagggtcatgccttattaatcatctcattatctttcatttctagtaactttcgttctattgcctcttccctctaagcacatataataactatgtttaaatctccatccacaaaccaaattaaaaataagaacaaagcacaaaattcatccttgatcttatatctttctatactgtccactttctcttttgcttccatcacaggcaaatttttggaattaattaatgctctccctcatctcataaaccttctggggaccttgtttctgttccagcatgccactcaaactatctttaaattactgggactttcctattctcatgcacatttgtttcatgttcttcaacttctacaggtgctttgttgggagaaattatctcctagatttctatgatagtttactccaggttaactctttcctcctcccaccatttcttctcatgatcttcaacaggtttctcttcctctgcttttctttaaagtgtttctcaatccaagagccctatcggaatcctgcaaaacctaccactgagttctccttgatgaagtgtttcctaaatgaatcccttaaccaattgaactctctcatttagagatacccaatactatggaaatttaccatcctgatcatcatttgttctttgtatactttccttatctggcccatgagttcctcatgagcagggtcatggccctatgtctggttgtggcttacagagaagacagccagtcagtacttgtttaatgtaacccagttgagctgttatcctttctctctgttgtctgtttacattatatattagctgcccttacagaagatctgtcctgcctttgttcttttacttgactctcattttaggtcttagcaaattttgcaaacttctttgaagcacaaagattctcaacactatttcttacttgcatttatgttcatcttctttcctttttttttttttttttgtacaagtgttcttacgtctgactttaccagagaatttcctgtttggctacctcttgagatacttccccattttcttcccagtcgggattgtgctatgaacaaggacccttccctctccagacttgtttcatgctcacgtcttagaattccaccaatctttgctctaagcttttagagttctgcctcctcaaaaggcggtcacccacctgacaatacccagctcacccatggttggctgtgggaggctctagagtaacctgctccttttatctccagggcccccgtcacttcctccttggttagaatagatccagagaagcagctctgcctcgcttcctctttggactgaagtcgatttctagcagctgtccctgtgggctccctgcacccgggcccctccctctgcagtcacccaacctctctggcagcatctgtgctgtttgatccatgcctggaaaacatcagtgcttcctccatctggatgggtggtctccagcatcgtcccactctccctccctcctttaatcttcaaccaaactctctgtgcacattcttccatcatggtcacacatttcactccaggtgtatatggctttgactggcttagctattgatcctatttcttttgaacatggcatttcctagaccttggtgttctaggccaattaaaaacctgcttccttatatcctggtgagggcaaataatggtgtttaccttcctgcattaatatccaacatgcattttatttgttaactatattttatccctactcatttggtacatgaacataatcactcattctgtgcctcttcaagttattcctgactgtgaattacttgacaccactagtattatttttctctgtaaactttcccaatatttatttgatactacacattttgcagaacaaagcctcgattatttttattctttattttttaattttgacttttaaagttccttattttctatttattattctattgttctatacaacaaagttaattattactgttaacttttttaaaaaaaaacttttaagttcaagggtacaagtgcaggtttgttacacaggtcaacttgtgtcataggggtttgttgtacagattatcttatcacccaggtattaagcctactacccaacagttatttttcctgattgtctccctcctcctaccttccaaactccaaaaggccccattgtgtgttgtttctttctgtgtgtccatgtgtcctcatcacttaactcccacttataagtgagaacttgtggtatttggttttccattcctgtgttagtttgctaaggataatggcctccagctctatccatgtccctgcaaaggacatgatcttgttctcttttatggctgcgtagtattccatcatgtatatgtaccatattttctttatccagactattatttatggacatttaggttgattccatgtctttgctattgtgaatagtgttgaataacttagttcagccattgtggaagacagtgtgacatttcctcaaagacttaaaaacggaaataccattcaacccagcaatcccattactgggtaaatacctaaagggagaacattattttttattactattattatttgaccattttgggaggttatcttcacgatttatacatgattttcaggaacccctatttcagtacaataatttatgatgcagaaaattaaatcccgtcctgaggataatagtaatagtagtattagtggcaacagcactagcaatagtagtagttattctattaaatatccaatacatatttattaagcacctattatgggccaagcaccctgttatatgtaggggagaaaacagtggaatacattcaaactgtccctgacccagtggagtctgctgtctcctgaggggctcacatattcacatgaataaaaataaaagttagacctatggtacaggcatggcagaggctactggtcaccccccactaacccaatccatctgtagatttttaggggtagaacctctgaggtagctggactcatggctgctcagccagagacagaggccatatctccctcttaactgagagggagcattctatttaataagcacttctactgcactccctgaccgctagccactgtcctaagtcctttaagcatactagctcgtcttatcttcttgagaacactttgaggtagacagatgaggaaacaaaggaacagagaggttgaatattttaagtcacacatctctttttcttagagatgaagtctcactctgttgcccaggctggagtgcactggcataatcttggctcaccgtcacctccatctcctgggttcaagaaattctccagcatcagcctcccgagtagctgggactacaggtgcgccccaccatgcctggctaatttttgtatttttagtagagaagaggtttcaccatgatgaccaggctggtctcgaactcctgacctcaagtgatctgcctgtctcagcctcccaaagtgctgggattataggcgtgagccactgcgcctggcctaaagtcacacacctcttaagggaagtagctagagtacaaatccagccagtctagcttcagagtcaatgctccctgtgtctatgtataggcatagatttttcaatatcatatgtgtgtgtgtacatacaacctatatgtgtaaacacaaacctgcagactgtgtgtatgtgtacagaggtcacaccagtccttcaattaattaatttatttatttatttttggagacagggtcttgctctgtctcccaggctggagtgcagtggtgctatctcgactcactgcaacctctgcctccagggttcaagcaaattcttgtgcttcagtgtcctgagtatctgggactacaaccaggcaccaccacgcctggccatttttttttttttttttttttgtattttaatagagatgggtcttcaccatgttgctcagcctagtctcaaactcctgagctcaggcaagccacccgcctcagcctcccaaagtgctaggattacaggcgtgagccaccgtgcctggtagtccttcaatttaatactgcaaatttaaccttgcttcactgtacggcatcagctccttggacatctacacggactgtggacaccatttgatccaatgtatagctagttctccccatggctattcaactatacgtgcccccagtattcaaaggacatttggaaactcatctgatatctccaagtgctgctgcaaataagatcctgatgctgttttaggcacctgagtaaagtcaaaatctaagtacaactataactatgacagttttagagagattcttggcttactgctgttgagccacttacacaattctgcagagaataaatgtaggagagagcaacctctttcctgccacctgaccttcacttggtggtcagtcgtgtggagctggacgtcactgtcagcttcagtggagtccaactgctgacagataagtgggagcacatggcacgtgcgagataagagcctataagagcctggcggcctgaaataaatggcaacaacaatgctcttctaagtggtcttccgagaaagccctgttatcatcagcattgttcacacttagtaacaactttccttgaatggggttttcaacatgtttgttcctttcagtctgaattatctgccagggaagaaactctttctaaagtccgtcaacagttgtgagattgggttgaggctctcaaaggagtttccggctgttgtcaacacagcaggaaggggcaaggataaagggtgatttaggagcctgtgcctgggtaggtcctgccagagccagcccagcccagcccagcccagcccagcacagcacagcacagccctgcccagtaggtcacgcgagcgccatcagccaaggcttttggaaaaacctatgacaaggttttcagcttttcagagatgtgccaggactaacgcagtgttactggggagaaattaagaatgtatccgacgtgtgattcccaacttcattttctgcctactcgctttaaacagccagtatacaagaggccactcagccatggagaaagtccctgaaagttctacgagatattctgatcttagtatattgggttcttaatctgaaccatattgaaaattccaccatgtagtttgagctttgcaaagtcaggtcccaccatattttttttttttttttttttttttttttgagatggagtctcgctctgtcgcccaggctgggatgcagtggcatgatctcagctcactgcaacctccacctcccgggctcaagtgattctcctgcctcagcctcctgagtagctgggattacaggcacgtgcaatgatgcccggctattttttgtatttttagtcgacacggggtttacccatgttggccaggctggtcacaaactcctgatctcaaggagtccgcccgcctcgccctccaaagtgctgggattattcacaggcgtgaaccaccacgcccagccccatcataatttttctgtaactccccaggtgaccagtgcatccggcacagtaatgctcaataaacaagagttaaagtgaacggaagatgctaaatgccaccgccgattgtcatctactgatgtatgtttgagagaaatcttacggtgatttcccacagctgtcctggagtcatataaagagatattttgagggattaattctaaatattgggaatggaaagagagaaaagctctgagaaaacttcttcatttcggtgatcaggagaagatgcgtaaagtatcatgacttgcatttttactctctggacgaagttgttttcttattattttttactttcatttgttcattcactcatttactgatccacaggctttggagtcagacctagggctgtaccatcctactgtgcagctatggtgggccattgggcaagtctctggtatctctaagcctcaatatcccaccaaatgtaaaactaattcattcagtcaagagatgcttttaagcacctcctaggtttcaggtgtggaagagagtgagcaagagagacacaggccctacttttgtggagcaactgaacatgaaagtatcaaattagaatataggtttgaagaaatgtggaatgatgcacacagacacaacaagacagaaaatatgaaagggtgaataagaatgataaggactagttaaaatttcaaaacgagagactagagagagaagaaatgtttgaggataaaaggttgatgatttttcagatattaggaaagacaaaggccttaggtccagaggggacatttgtcccctctggatctggagatatttgtattatagtgacattacaaaatgccagagatgataaaaataacttaaaagcagccctagagaaatgacagacatcaaaaggaataataatcagatcaacagaagttttgacaataatggatccgcaaagacgataaaattctaagagaaaataactttgccaagccactctacctttcaaaaacaaggttgaacacattttcatataataagatgtaaggactctcaccttgaaaaaaaatcctcatgaaaggaacttctaaaggacatacttcggggaaaaaggacataaatacagaagaaatatctcaaacctcagatatgatcaagagtgtgagcaaagaaaaattggtagccacgtggataaatccaaacatactttgactgaataaaccaatagtcacattaataacaaattatagaatagaaaacattgtggaactaaaaacctaactaattaaataatggtaatagtttaggtgagaggaagatggcctgtactacaggatggacaacgaagaaaggacattagaaagcatgttagagcaagtattaataaaacctgggaactggagatgaaggtaaagaagagggaggattcagggatgctcaaagttcttttcttgggcaaattaacttctcaagacctcaggttccatattagaatagtgaatggactgcacgaaatgacatagaattatttttattctgctatattaagtgttcaatatgtgccagcaattattacttccacaatattgagagagtgttttgtttgttccccatgggtgagacaaagatgacctgaacatgatctaagtgctgaataagcttaaaatgtggtaaaagaaatacatacactactaagtctatttcaagccagagtgtgatccacatgccatcagggaagagcaaacgttgttttgaaaagcaaaggaagaggagatgatcctgcagtgaaatccggggaagattttctgaaaatgtcaaatggggccctgaagattctttaggatttaaaaatacatagttcttattttaatggtaatatatacctgtaggaaatctgaaaaattaaaatagtataaaaaagaatgaaattacttccaaatcctattatccagaaataatcacagacaacaggctactaggcatctcatcagacttttcaaactctgattctctgtttctatgaaataccttaacagtgaatgttgcatataacatcatcaaatgttatgcttttataaaatttttaaagctctagagggttcaattgtatggatgtgtcatagcgtagtgaaccaatcctggatgatcagacactaattttgttcctaatcgtttacttttgccacggtactgacatgcactttgcagttttacatactaagaatagaagaaaaatgaacaatcatgataggatgtctcaggcatagaaatcaagacaaatagaggtagagtgtgctcaagaacattggttctttccagtttcaccgaaatgaaaagtttgtgtacacgaatgtgtagaaactagataggggaatagtagatgaaactagagcccatcgtgatgggttctgaatgaatgatgtgtttggacatgattaggaaagtaactgggaagttgatgatcagatgtgcagttgagaaagttgtatgtaattaaaagcaatagacagtgtatgtcagttaaaaatgctttctgctgcaagtaatagtaaacacttcaaaaaagtggctaataaagagtgtttatatttttcatataacccaaatggtgacagccagcggtggctgattgggttcagatgttcagtgatatctacagaaggcgccgggtcttcctgatgctatgctctgtgatgcttagagcacattattggctttgtgcttcctggccacaggatgactggtgtagcttcaggcatcatggcctcaaataagagccagaatcaggggtgttgttatggcagagaaaaacctgcttgtgtccctctcatctttaatcagtaccttagtttgccagggttgccataacaaagtaccacaaactggtggcttaaaacagcagaagtgtgttcccgaggctagaagtcgaaaagcaaggttttggcagggccacgctcctctgaaggctctagggaaggatgctttcctacatctctcctagcttcaggcgattgctgcaatccttggcatcccttggcttgtagctgcatcactccaatttccgcctctgtcttcacatggtcttcttccctgtgtgtttcctctgtgtctctgtatgttcaaatctacatcttcttacccttacaaagatgctaaccattggaattagggtccatggtaatctagtatgacttcatcttaacttgattagatctgccaagactatatatatttccaaataaggccacactcctaggtgccatggattaggacttgaacataccattgggggggtcaaaattcaatccactacaattggggaccaaaaattgttctcacaatttcctggtaggtgctccttcatagctcatggccagttctgagtcactactcatccctaggcctggggtgtacccactttctatggatattacgagctctctagttgatacttgacaaaagtcagaattcaaacaagggagaaaaaaggaggagtagagaatgtttgctaaatgggctacaggatctgccacatagagggacaacttagaaacatatattccatatatatgtttatatatggaatattacatatattacataatattacatatatatgtttggaatatatatacatggaatatatatatttcgaaggttggtgcaaagtgcagttttgccattgtttttaatggtatatatatagttggacaagacatagggactgaactaaaacaaaaggcataatatgtcaacaatatttgtggagatagactcaatataccttggaaactacaattatgagcacaagggtctatgtgcggggatgagaccaatctagaatctgggagctacggatctctgtgaccttgatattaaaagagtgaatagagggcaatttggaaaaggtgagaaataattgagctgtagagaaacatatgcatggttaaagatacagttctattgcttttttattagtaatttccatttctagctccacacactcacccatccactcaactgacctaaagtgggaaggatatttccagcctaataaatctctggcaagaacagcagctctctggcaaaatactcagcacctgccatggaaattagaaggcattgggatgacagttgcttttgtttggaggatgaacatcaggagtgcttgagaagtgacagtggaactgcttccctctcaccatgtctgtatttggatgtacatagaatgttttaaccattcctgaggtcccatctccacgtacctgagcctctggggtgcagacacacacctgtggttttttctattagtcacttccttggtaggcctccagctggaaggaggaaaggacaacgttggaagccaaagtcaccgctttgattctggtaaccttgttggagatgctgcactctgaaaacacagtacatccatttccagaaagtgaagcctggaaaattagtgcctaatcgatttcattcataaatccccatcatggcagcttacatgacgttcaaggaaaaacttctcaagcctctccatttaaaataaatgttagcttttatagtaacattgagcaaaagatttatgtccattttcttcacattgtttgacttctaagtgtcttcccccacttttcatccaaggtaaactttcaaaaatgttttccttgaggctgggcctgtaggaaataatacatagtaatcccagtacttttactggctgtgtttctgtcaggatcatctagtaaattcagtgcctttagcaatcttatctcttatttagtaggagattaaagaacacagagccaattatcctcattttctggatgaaaagactgaggtacaaaggagtttgaagacttaatgtggttgcccaatagctagtgccaagtctggggaaaaaattgactttcccatcccctaagatgaaaaggcagcctctagttttcctgtggttgggcacaaacattgaggaagatagttaaaaacactaaatgatcctaaaatgcacatatattgaattgacataagctatgtgcaaatgctgaacacattgtatctaccatgtagaacataatctataaaatttaacttctgttttcccaatctttacctgagtgtgcatttttatattaacatttaggttgggtactttaatatacttgagtttgaacacagtaatatcacagagtgattttttgacctaaaccagaaattatctctccttccagctgagcagctgagcaaccttcgtcttctgtagaagaagggaagaacagtcctcgtctgctcgtttattgagacaatttagaatctgtgttttaaaatggtccatgtatacttgagtgtgtgagggaataaaagtgaattgaaatatgaggaactgagttaacaattgagttcatcatctaggaagattgattcctggatctgccactgcttttctggaggtctctggtggatcacatcacctgctctgaacctgcctttccagtggttgaggttattatgatacaggaggtctaaatttcctttcagctacagagtttgttatgctttggattgtgtctctcccaaattcatacgttaaagtcataactcccggtacttcagaatgtggtcttatttggagataggccctttacagaggtaataaagttaatatgaggtcattagagtggcctctaatccaacacgactcatgtctttataaaaagaaggggtaatttggacatgtaaccatgtgatgacacagggaaaagatcatcatctgcaaatccaggagagaggcctcacaggaaatgactgctgctgacatcttgatcttgggtttttagcctcaagcactatgagacaatacattcattttgttcaagacacccacgctgtggcactttgttatagcttccttagcaaactaatacagagttctctcattctactctgtttaattgtgtcattacacatttagtactagttagtagcatttttgtaaatgtttatatgtatgcattatcttactgaaccctgacattgtgtgaggcaggaattattgtcctaatttcacagggattagacactccattacagtttaaagataagtaaaggcaggctctcatgtaatttgaccaaactcaatgttctgggggcagatctgggtcacaaataagagggctctttccaaaattcatgctgtgtcttctatttcatgttgctttttgaaggatcataagagcttgtgtaattgttataatcagaaaatacatgcttaaaaaacagaaatagggaaagttaaggcagctctcctgagaacttagagaaacactgtctaaaccgaagaagttgcgggtatcatccatgaatggagaaatacaatgggaactcttttctcctcaatatatctcatttgcttgcttatttagcccaatttggctggaaagataatcgttgaggccaaaatccacaagacaaaggaagacacgatctttcagagaaaaaaaaaatattctgagtgaaatattcctgttcgcaaactgttaaatgtgcagctccaaggagcaccctttaatacatcaagaaaggatttattgtcctcacaatgaggagacggggcacacatgctgcaggaagggctgcaggttggcagaatgttctggaaggcaatttggcagcatgtccccaaagcctccataccctttgatccagagttctacttttaggggcttatcctaccaaaacaatgcagtccaaagtggggaaaatatgtgtatgagaatgtcctgagcagctcaggtatctacctcagtggtcagaagaggagcatgaggtggaagaagagagctaggacttgagggtgccagcactgggcacccagactcaggactgactgtcaagcaatcatggtgaatgttgacatgggcacatgtatgtctaataacacgtgatggtgttcatgacatatgttaaatactaacagaaaacatagtaaaaatagtgtatgtcgtatgacatggatatgtgtatctatgtacatgtacacacatgtgcatccatgtacatatatgcacagacatgtttacatgtgtttgtacacacataaggggtagcaggactcaaatgacacacaccaaatgctgactatggttgtccttgtatcataaaaccatgaaagataggtttattttttccattttctttgcttatatagtaatttctttctttctttctttttttttttttttgagacacaatctcactctgtcgcccagtgcagtggtgttatctcggctcactgcaagctctgcctcctgggttcatgccattctcctgcctcagcctcctgagtagctgggactacaggtgcgtgccaccacgcttggctaattttttgtatttttagtagagacggggtttcatcgtgttagccaagatggtctcgatctcctgacctcatgatccacctgcctcagcctcccaaagtgctgggattacaggtgtgagccacagtgcccggccatatagtaatttctaaacttcctacaacatatatttatcaatctagtaaagagaaatgtttttaataaagatttgacctgttaatgtctataatattgtcatggtcattatttttaatttaacgtatcatccaggtcttccaaactgttggattcttagagctaataccaatatttgctaagaacatgaagcactctcttatttaacctgggctgtcagtcattctttctttctttgatgcagtttgccttaacccaagttcagatgacatgaaaagtcatttgtattatgttcttggaagcttggacaattgtattactcacattctacatgtccagggatagctaatggttagtagttttactgaaccgtaaggtcacctctgatggaatattcattgagtactgatactatgtatcttgtctgtattagtaagagttttccagagaaatagaactaataggatgtgtgtttgtatgtgtgagatgtttgtgtataaagagatttattataaggaattggttcacataattatgaaggatgaaaagtccgaaaatctgcagttggtaagctggagacccaggagagctgatggtatatttccagtcctagcctgaaggctatagaaccaggagagctgatggtgtaggttgcagttgaaaagctggtaggcttgaaacccctgaaaagccaatttttcgttttcagtccaaagacaggaaaagaccaatgtcccagttcaaatggtcaagtaggagggattttcttttgctcagccttttttattctgtttaggtcttcaattgattggatgagcacacccacattatggagggcaacctgctctactcagcctacagattcaaatgttaatcttatctagaaacttctcaaaaacacatccagaataatgtttgaccaaatgtctgagcactctgtggcccagtcaagttgacacataaaattaaccatcatattgtccaacatacaaatgtgtctcaatgggcataaactgttgaacccaaacctccttaggggctattaccacttgtcctgttaagctggaagaccccatgggctgacttactcttctgtggccacttcacggggtaggtccataagagacccttgataatatggaagaccaggacttagttattgaaatgcacttctgtatatctgctctgaattaaattatatacagcaaatggactctatcagataaaaattataaaatgaatgctttaaattctccactgacttttataaaatacttctcactctttggctaccaggtgatttcgttgggtgtgtgcacaaatgcaagctcttgccaccattaaattggctattttatatatatgtgtgtgtgtgtatatacatatatatatacacacacatatatacatatatatacatatatacatatatacatatacacatacatacacatatatacatatatacatatatatacatatatacacacatatatacatatacgtgtgtgtgtgtgtatatatatatattctgctcagattcaaattcccaaaagctgaggggtggagctatttacctgctttccccctgggtgttccaccctagacactttggcattaagaaataaatgctaaggtacagagttggttgtttggtcctgaattcaagattctgtcctagctcaagtctcaagtttgaaggatggtggctctctcaaggcagaattggaaccaggaataacatccacacatgggggctaggagaagtgacttggctaaagaagaggacatgccagtagagagatctaacccagtgtccaagccatcttataatcttgccaactctggaaacagccagttctgggtttccaacctgaaggtagatcaccgatgtagaaaatccagtgggctgaggactggagtgtgaggctgtggtcaccaggaatagctgtgcatggatagtaggatccaaggtgaaggctgggacagagaaatgtaaggcagctgtccagggaagggctcaactgtagtatggcagggattcaggtctaaatccagcctagtggttctcaattagggactattgggcaatgtctggagacatcttggggcattacaactgggatgattggcatctaatgggtgtcatcctacaatgcacaagatagtatcctacagtaaagaaggatctgtcctcacatttcaacagtaccgaggtggaaaaactctggtaaccttctaggttgggacagcaaagacctgggcaggcaaatatggaagggcaggaaggagagctgggtctgggagcagatcagcaccctgaaagccaccactggcagccccacatgtggtctgatttgcaagaatgagcaccaagtggcaggagcccagtgctgaaaatggggtcatgatcatgggctgagcttggggttgtttcttgtgaagacccacaagacatgaagaaggaaaatgaaccttaagacatgcctcttgcctcaggcagggatgactcaggttggggtcaaggtgaatggtggcgcatcactgggaggcccattgaggggacataagagaagacatgggcaatggcaatgaggcctgaagtcccagaaaggagcatgcaaagacttcccatgagggacattggaagaacttttccttttccttccagacagcctccccttgcataggttatctgggaaaggaatggactgtggtgataaagagcatgtgctctgcagctggcctgctgggactaggatcctgtctctgttctttgctggctatgtgacttctcataagctatttaaattgttcatgcctctatttcctcatctgttaaatgagaacaataggcctggtgtggtggctcatgcctgtaatcccagcactttgggaggctgaggtgggtggattacggggtcaacagttcgagaccagcctgaccaacatggtgaaaccccgtctctactaaaaatacaaaaattagccaggcgcagtggtgggcacctgtatttctagctactcgggaggctgaggcaggagaatctcttgaacctgggaggaagaggttgcggtgagccgagaccatgccattgcactctagcctggccaacagagcacgactccatctcaaataaaaataaatatatgaaaataaaaaagaatattaaaatagcatctcatagagataatgagagttaaatgagttaatacagctgacccttgaatagcactggttttaactgtgtgggtccacttataggcaaattgttttcaactaaacacaaattgaaaatacctgtgtgtgctgaggactgtcttcatacagcaggttctgaaagcttgactgtggaacttgaatatgagcagattttggtatattgggggtactggaaccaatcccctcagtatacctttatttgcaaagataagggtaacaactatgatatttataaatatatatatatatattgcacacccacccatgaatgtaatatttgtgaatatatattttcatatttgtaaagatgagatgtgataactgtgtttcttagtttctcaaaatagatactagtttattttccacctcttaaaattaaacatcttgtgaaattgaaacaagaaaaaagaaaagttttttgcttctgctgtccttttctcaacactcccaggttcccagggctatgagaattggggtcagtcacacctttcctgtagggatagcacaatgagtgggctgtggtcaggggtgttggtcaaaactgccttggagtaatcccgaggacatattcctccctcctccccgactccagcactgaaacaacactcagctcaaagagtttaggtcagacttcctatgtccagtctgcctccccatatcaactttagttgcttgtcacaaaaacattttgctcacaaaacattccaaaatgcgcaggttagagcagggatttacaaccaaggtagtgtgaaccgccatcctggcatctgtattgagtgcagctaatcagttacaaacgtgcacactcaccaaacacaactctgtacctcaaatgtgggaaggcccctaaatcctatatccagcatatgaataaaataaagggaaaagcaatcatgctgagatgtataataaatcagcatgactttgttttaaaattttgctaaagtttaaacatgcaccggggaaggtgtctattaatagtcattaatatgcatagagatcttcacatatttcactcactaatgcatgccagaatttttcttttcctgctgggatttttcccccaacaaatttttctgttgagattgtgcttcttagaaaaagataaggcaaatgtggttgagcaagttggacactggacacttgactgtgtgtgatgacttcactaataattctagcttgattaaaactggtaatctagaaagtgaatatagtattaagaattaggcttagagttaaacagccaatctaagagaattgcaaatgatttcttattgcctatcaagattcaaataatgctcagaacactcatggctactgggtttttgttgaaaagtgatagctctgggtatgaagaaaaggatgacctcacacacatctttcatccctgtggccttgggaaggaaatcttcagttggaaggtttttaggctacaaataacatgaatgagtagagtcgtagcccttgttttttcctttgtgatttacactgcaatgttctaaggagcgagcaatgaccttcgacatccacatggccttattttacaggggagttgagagccactgaatttatgtccttgtttgagcttccaaaaccaattagcatcagaggcaagccttgatcatgcggctcttggttctcacttctgggctccttccctcaccctgggtgggtcccttctggcagagacatctgctctggagcattcatgcctaaagagtgacatgacatttttcagcacctattacggcctgaaaactggaatccattgtgatgttaagatgctgcactttgtgccaatgagtctttatttcccactttgctttaactcaaaccttgtgtgatacttccaaatgtctgtctcaatccactctgatcttcaacaccagcaagttccaatgggagattttaattcccagtctgctcttgggaaaaggataaaaattaattctcaggttcctcttctcccagtccatgtttgaaactggagatgcaagtggtactcacacaattaaccttctttgtgaccatctctcccaacgccagctttgctgtcaaactctctatacaattcagtgcaagaaacacactattgtggggatcctatataagacagtggataggagtcaggactagcttacagctcccatgggacagacagagcagtgtgtggagactcacatcccaaacttttgctccaagaatgaccacagaaacatgccaggaaagccgagagaatccatagacccttcaaaggaactgggttcactactgtgggctccctgagatgctgaaaagcaagtctgcttgctttctcagaagggaggcttgtggtgtggggcaagttctccacccaggtcaccagctgcttggaaatagactgggtgctgttggagggggatggtgggagtgagaccagcctttaggactgcgggctgtgtgggagtagggtgaggcctgtgattgctggctttcccccacttccctggtgacctgcacgactcagcagaagtagctataatccccctgggaatacaatactccattggattgggaaccgcaccctcatcccccacagcagccatagcaagccccgccaaaggagaggctgagctcagacaaacctatccctaaccccacctggtggtctttctctgcctgccctggtagctgaaaacaaaggtcataatcttttgggagctctgtggccctgcccacagcctgagaaacctgaacacttaaccaggtgtccctcagacaagattgtatcctccctataggactgcagctaatgtactcttgaaagtgccaccccttggctggaagccaagcaacataaaaccagcacactaaacaaaaacataaccaaggaccctgacatagtccacttcattcccctgctacctccaccagagcaggtgctggtatccatggctaaaagacctgaagacagatcacatcacaggactctttgcagacactccccactatcagcccggagccctgaagctctgctgtgtggctagacccaggagagcaaaaacaatcactacagttcagctctcaggaagccccactgctaggagaagggggagaacgccacattcagggagcaccccatgggataaaagaatctgaacagcagccctggagtcccagatcatccctgacatagtctacccaaatgagaaggaatcagaaaaacagttctggtaatatgacaaacaagattctttaacatccccaaaagatcatccagctcacaagcaagcgatccaaaccaagaggaaatctctgaattgccagaaaaagaattcagaaggtagattattaagctaatcaaggaggcacaagagacaggtaaagtccaacttaaagaaataaaaaacatgatatagggtatgaaaggaaaattcttcagtgaaatagatagcatgaataaaaacaatcacaacttctggaaattaaggacacacttaaacaaaatgcaaaatacactagaagtctcagcaacaggacagaacaagaagaagagagaacttcagagctcgaagacaaggcttttgaattaaccccatccatcaaagaccaagaaaaaagaatttaaaaaataaacaaagcttccaagaagtttgagactatgttaaacatctaaaactaagaataattggcattcctgaggaagaaaataaatctaaaagtttgggaaacatatttgagggaataatcaaggtaaacttccctggccttgctagagatctagacatccaaataaaagaatctcaaagaatacctgggaaattcatcacaaaaagatcatcgcctaggcacatagtcatcaggttatctaaagtcaagacaaaggaaagaatcttaagagctatgaggcaaaagcatcaggtaacctataaaggaaaacctatcagattaacagcagatttctcagcagaaactctaaattctagaaagggttggggttctatttttagtctctttgaacaaaacaattatcagccaagggttttgaatccagtgaaactaagcttcatgaatgaaggaaagatacagtcttttccagacaaacaaatgctgagataattcaccactaccaagccagcactataagaactgctaaaaaggagctctaaatcttgaaaagaaaattctcaaatacaccaaaatagaacccccttaaagcagaaatctcacaggacgtgtataacaataacacaatgaaaaaaaggtatccaggcaacaaataccatgatgaatagaatagtacctcacatctcaatactaacattgaatataaatagcctaaatgctccacttaaaagttacagaatggcagaatggataagaactcactgaccaagtttctgctgtcttcaggagactaacctaacacataaggactcacataaacttaaggtaaaggggtggaaaaagatactccatgcaaatggacacccaaagtgagcaggagtagctattcttatatcagacaaaacaaactttaaagcaaaagcagttaaaaaaaagacaaagagggacattatataatgataaaaggactagtccaacaggataatatgattctaaatatatacacacttaatactggagttcccaaatttataaaacaattactactagacctaagaaatgagatcgatggcaatacataatagtgggggactttagtactccattgacagcactagaccagtcatcaagacagaaaatcaacaaagaaacaatggacttaaactacaccctacaacaaatggacttaacagatatttacagaacattctacccaacaactgcagaatatacattctattcatcagcacgtggaactttccccaagatagaccatatgataggccacaaaacaaatctcaggaaatttaagaaaatcgaatttatattaggtactctctcagaatacagtggaataaaagtggaaatcaactccaaaaggaaccctcaaaaccatgcaaatacatgaaaattaaataacctgctcctgaatgatcattgggtcaacaatgacatcaagatgggaactgaaaatttctttgaactgaacaataatagtgacacaatctataaaaacctctgcaatacagcaaaggtggtgctaagagaaaggttcatagcattaaatgcctacatcaaaaagtctgaaagagcacaaatagacaatgtaaagtcgcacctcatggaactggaaaacagaaacaatccaaacccaaacccaggagaagaaaagaaataaccaagatcaaagcaggactaaatgagactgaaacaaaagaaatacaaaagataaataaaacaaaaggcaggttatttgaaatgataaataaaattgatagaccattagcaagattaaccaagggaagaagaaagtccaaataagctcatttacaaacaaaatggaagatattgcaactgataccacagaaatacaacagattatataaggctactatgaacatctttatgagcataaactagataacctagaggacatgctagaggatatggataaattcctggaaatatacaacactcctagattaaaccaggaagagatagaatttctgaacagatcaatgacaagtactgagattgaaatggtaataaaaaaattgccaaaaaagtccaaaaccagatggattcacagctgaattcaatcagacattcaaagaattggtaccaatcccattgacactattccaaaagataaagagggaatcctccctaaatcattctatgaagccagtatcaccctaataccaaaaccaaggaaggacattaaaaaaaaaaaaaagaaaacaatatccctgatgagcatagatgcaaaagttctcaacaaaatactagtgaaatgaatccaacagcatacagaaaagataacccaccacggtcaagtgggttttataccagggatgcagggatggcttaacatatgtaagtcaataaatgtgatacaccacataaatagaattaaaaacaaaaattacataatcatctcaatagatgcagaaaaggcatttgacaaaatcctgcatccctttatgattaaaaccgtcagtaaatcggcataaaatgaacataccttaaggtaataaaagccatctatgacaagcccacagccagcattatactgaatggggaaaagttgagaacattccccttgagaactggaacaagacaaggattcccactttcaccacttctattcaacattcaacatagtactggaagtcctagccagagcaatccgacaagagaaagaaataaagggcatccaaattggtaaaaaggaagtcaaactgttgctgtttgctgatgatatgatcatatatgtagaaaaccctaaagactcatcccgaaagctcccaaaactggtaaataaattcagcaaaatttcaggaaacaaaattgtgttagtccattctcacactgctaataaagacatacctgagactggttaatttataaaggaaagaggattaattatttaacagttcagcatggctggggaggcctcaggaaacttacgatcatggtggaaggggaagcaaaaacatctttttttcacatggtggcaggaagaagtgctgaacaaagggggagagacctttataaaaccatcagatcttgtgagaattcactcactatcatgagaacagcatggggtgacagcccctgtgatccaatcacttcccactaggtccctccccaaatgtgggcattaaaattcagataacaattcaagatgagatttgggtggggacagaaaggccatatcaaaaattaacgtacacaaatcagtagctctgctatacaccaacagtgaccaagctgagaatcaaatcatgaactcaacccccttcacaacagctgcaaaaaaaaaaaaatatacttaggaatttacctaaccaaggacatgaaagacttctacaaggaaaactacaaaacactgctgaaagaaatcagagacaatgcaaaaaaagtggaaacacatcccatgctcatggatgggtagaatcaatattgtgaaaatgaccatactgccaaaagccatctagaaattcaatgcagttcccagcaaaacaccaccatcattcttcgcagaactagaaaaaacaatcctaagaatatagaatcaaaaaagagcctgcatagccaaaacaagacttagcaaaaacaacaaaactggaggcatcacattgcacaacttcaaactatactataaagccataatcaccaaaacagcatgatacagaatagagaacccagaaataaagccaaatacttacagccaactgttctttgacaaagcaaacaaaaacataaattggggaaaggacaccctattcaacaaatggtgctgggataattggcaagtcacatgtagaagaattaaactggatcttcatctcttaccttatacaaatatcaactcaagacggatcaaacacttaaatctaagacctgaaaccataaaaattttagaagataacattggaaaaatccttctagacattggcttaggcaaagactttatgactaagagcacaaaaacaaatgcaacaaaaacaaagataaatagatgggacttttgaaaatctgcacaacaaaagaaatattcagcagaattaatagataacccacagaatgggagaaaatcttcacaatctatacatttgacaaaggactaatatccagaatctacaaagaactcaaacaaatcagcaagaaaaaacaaacaaaaaaacaaaaaacaacccatcaaaaagtgtgctaaggacatgaatagacaactctcaaaagaagatatacaactggtccacaagatatggaaaaatgctcaacatcactaattatcagggaaatgcaaatcaaaaccattatctgataccacctaactcctgcaagaatggccataatcaaaacaatcaaaaaataatagatgttggtggggatgcagtaaaaagggaacacttttacactgtagtgggggtggaaactagtataaccactatggaaaacagtgtggagattccttaaaaaactaaaaatagatctactgtttgatccagcaattccactaccaggtatctacccagaggaaaataagtcattacacaaaaaagatacttgcacatgcatgtttgtagtagcacaatttgcagttgcaaaaatatggaaacagcacaaatgcccatcaatcaacgagtggataaagaaaatatggtatatatatatatacacatacatacacaccatggaatactactcagccataaaaaggaacaaaatattggcattcacagccacctggatggaattggaggctagtattctaagtaaagtaactcagaaatggaaaatcaaatattgtacattctcactcatatgtgggagctaagctattagggcacaaagacataagaatgatgcgttggactttggggactgagagaaaagagtacgaggtggtgaggaataaaggactagacactgggtacagtgtacactactcaggtgatgggtgcatcaaaatctatctcagaaatgacccctaaagaacttattcatgtaaccaaacacacctgtttctcaaaaacctattgaaatataacagtttaaaaaatttaaaaaagaaaaaagaaacacaccattgtggtttttacaagaccccaaagtttgaggaattggttagttagctccacattttgacactcaccatgtgtgtaacacagcataaagcctcccctctgtgagctattagatgagaaagatgaaacaatactggcacatctgaaaaagcataagaatgagcagaatggtgccagtcatgcaacagagagtggtgaaaatagtgtgtgcactcatttttggaaagagtgattggcatctggtgcttgttcatgaaaatgtagaatttcaggacctgggaaagagttcattcaatattttgactggctgtggtttaaatgaacaactgtttctgaacactcctgtgccaatgactgtctccccatctgctgaccatcaccccgtcagtactcatctgtgagcagcatctctgtgagccacgcttcagcgcaaggtttgctgtgctgcaatctgcttctgtttgcatacgaaaagagaaaagtgaataaatgtttcaaaattcctacgttggaaagattctgaatccaccccagtcgtcatctacttctttatttagaattattcatatgtgcgttatttacagtttctccatgtggtgtgctttcctttgtgtttctcttaacatttttaatgaccaaaggcaaacaggaatcagttattttgtcacaattccttcccatttaaatggagatggccagattttcctatggcattcatactatacctattttctttcttactttcttaatttcctctcttaagtcttatctatatctttgttaggaagaaataatttcagatagaataaactaattaatatatagttatagatattttcagaactatctattatagtttcagaacagactattttgaatatatatatatatattcaaatactcagacctgcaatgagcccaaatatgtatttaaatatacatattcaaactaacaaaattttagctgcagctaaatagcaaacttaagaagatgaaagatagatgagccagaattgtgatgggcctgagcttctaagatctcagtaggtgttttacctcctaaaccaacattgggagagcgttaaaattatttatctctgcccttcagttacataagctaccttctattgatctgtctcattaaactgaggaaggcatgtgagactcactgccaaggaattcaattgcctcattgccacttgttgctatttatgtgtgaaaatgacagaaatttatcctgccatccaggattttaaacaaaaacaacttaaatgaaaaagcctcattttctgttggggtttcccttgggaaggaaacattgctctttttaagtgggatgaattttgcacttcattaaacgccttgatcttttcatcactttagcctttaatgcaataacataatcttagatcatctagattaatgattacaataaaattgtgcatataaatcttacaagggccatgaaagtgagcagctgcagatgctgaagtctgatttctgaaactttaggcagatttatctctattgacatatatcctactttttttgtctaattaaaccaagcttaatcttttcacatgtttttctcctagagacttatcaaacttccagtcaaggagttgaacaggtctttgggaagcaatttgttccctggcctaatgtttaactcaaatccttctggtgtctttcaagttccgtcttgatatttgtggaaatcctaaactgcacaagagccctgttacacacagaatggcattctccaagaatccctgcagccaaagattgtgtcccaatttaggacatgatgattaagactatttcactgagagaagcatccctattgttcacctctctgagacctactgagccaggcaggaggaagtctccttggcctacttgcaccagcaggagcgagcgactcagagctgcaatgagcccaaagaacacagggcaacagccttggcatgtaggccaaggatttttaaactagtcttaataactcaggtcaagttcccagctagggtcccttaacaagtcaagcaaagaaagacttggggagtttggagcattttaggttctgctgtgtaaggtagcagttcttggttctaccaggaattccagacatattgtcctagaacattctgtggttccataggtgcaagacacaaaatatactactatgctcttctttgaggctaggttttcagatgtgtatgtgaaagaagtaggaaccatgtctgctttgtaaatactggtgtcttaatagaggttcatgtgataaagcaggggaggcctcagtgtggtagaggctttgtgtctcagtttgggctgctatatgggaataccacagactgggtggcttaaataataagcatttatttcatttcccacagctctggaggctgggaagtccaagaacaaacgtgctagacaattctgtgtctggtgaaggcccacttcctggttcatagatggccgacttcttgctgggtcctcacatggtggaaagagggctggagagctctctaggatcccatttataagggcaccaatcccattcatgaggcctactctttcatgacctaattgtcttaaaaaggccccatcatctaataccatcatcttgggggttagaattttaacatatgaatggggggtagaaatatttaatccatcatatcatacaaactgtacagtccactgagtttaatatcctggaagagcacatacattatccattcacatgttactatcactcaagtaggtgcattgttggtggctctggccaagatcagaagcctaactctaagaagtgagggtatcagtaggtcagagtaccaaaggatgttgtccttcctcccataggaagtagataagctatatataggtcacccacatctgctttggagagtagccttcacagatcctatttgaaatacagtgacttaaagtcagctaatttgccaaacatccatcacagatgaaatatctatccaaagatatgatatacagaaactgggtcgaaggtggtaaagcataaaagaaaacaagaaaataaacccagaactacccagttagactctaaacagaatcctcttctagagagattaagctcttgcaatttcccaattgcttggcttggggttggtgatgggaatagtcctgataatttttgccatgcctgtgtggacccagggggctactggtactcattaaatattttgaaatattcaaaatggctttactaaaatttgtgagacaagaaaagtgaacatcacaaattaaggaaacacgaatgagaaggctggggatactgcaggctcaaccctttccatggaaccagcaaaactcaagctcacctggtattttttccacctctcctgtattttacctactttgtctttacactgcaacattggggagcaatttgctccatatgagttgcctaaacattcagaccaagaaagagagaaagaatcatctttcccaccttcttaggatctgccttctgtctacttccattcattacccagaaattaaaaccagaaatggcctttctgcccaggcaaagttccactttctacccaaaggaatgcaagcttgcctttgcaaggatggattaaaaaatcatacctccataccatgaccaaaaacccatacaatcaatgtgtacccgatagtcaaggctaactcatttatttagcgtcacagagataccttaattctcttgctttttcattgcttttaaattttccctccccaggcactgttttctccttctgaaatccctactatttgtgttatatcttccaagtctcttatgttttctttttttatggttttcattgctttgagatttattcaaactgtaagatatttctttttggttttctgaaacacaaattcacattttttcagtttatttgttttcaatatcaaaagcatgcttcttagttctccaaagttacttttggtgctgtaattgcatatccctgaagagtctcatcccttttcagtttttctcttcttcttcttcaattggaatcaccactggtaggtgtggccttggggcctctcccttggaggaccgagtcccgttcatcttctttgttttccttagcacacctgtagctgtgtattttccagcactcattctggtctggatgttgggagtctcttgaacagggacaagctggaggctgggggagggtaggtcagactctggtttggggtctgagagagacagacctggccacccagacctctctggagcatacactggcagcccctgtcaaccacaggagcattgggtaacttcaacttgcaaaagagctttggcctatgtccaccagggctggccactgggaagccactccatgctccacccaacaaggagacaggtacaatcctttccaagaagaacttaagggctctgctggctgggcctccttggggagccatgaaatcagtggcattggcctcagacgtagaggacaggccagcctctactataccatgggtcccttggttcccactaagaataataataatcatgtaaacatctggtgcatacctagggctgacactaagcagagagaaggtgaggtggaccaccctgtgtagctgcagttcctggaactctcagtgccacagacacccttccagctccacagtaagcctgcttacttgtgttattataagaaggagttgaggggcaaagggattggaggcatatattcagatatgccaaaggttgttttctttcaaggtgatacatgctaataagcacgaggccaaagcaggcttccctgagagcagatgggtgtgtgcatgcgtatgtgtgtgtgtgcacacacgcatgtgtatcagcacactgtggactgacacaattaacctgaccagaattagctcaatgcatcatggcccagggtcagaacagtatctcactcacccaagagatgggttccatcatcattcatctctccatttcccacctatccatccgtcttcccattcagcctattccctacccccatcccacccctccatctacccatttatttttctatagtattcctgaagtcagggcgtttaatatgtgattttgtggaaaaatgtaggagacagggagtttatctccaggatcacgtttcattcatatttaacacatctgtactgctggaacaagatgcaaatcccacaaacccttatattgcaacacctcctctccccccgcttttaaacctgaacaataactttgagcaatataattctaggtcattaagagaaaacattggctgggtgcggtggctcacgcctgtaatcccagcactttgggaggctgaggtgggtggatcacctaaggtcaggagtttgagaccagcctggtcaacacggtgaaaccccatctctactaaaaatacaaaaaattagccaagtgtggtggcgggagcctataatcccagctacttgggaggctgaggccagaaaaattgcttgaagccaggaggcagagtttgcagtgagccgagatcgcaccactgcactccagcctgggtgacagagtgagactctgtctcaaaaaaaaaagagagaaaacattgatgcgtcacataaaataataacattgagataaaaatggcacattacagaaattaatgctttgtgacttttcaaagcactttcacattcattgtcttatttggtttccataggcacctatccatcagcaaagtagggctggcatctttattaatttcataaacttgtttagagcttattttccagatttcataaatagcttcagttctaaaaaaggtgagtagcagggttctggagtatacatatttagtgtaatgatttggtaaaataattacacattgtctgtaatcccagctactcaagattactgaggcaggagaactgcttgaacccgggagcggggtgtagcagtgagccaagatcacgccaccgcactccagcctgggtgacagagtgagactcaatctcacaaaaaaaaaaaaaaaaaaaaaagaattatatacagtatcttaaaaataattttctcatcatccattattattcatgctccctaagcctttttcaaaccccaatgccatcctctttccttccagtacattttaagtctaccttataagtatctgtaaagcagtagaatcaaaatccacatgaacagccttcactctatttaacagggcaactctactactaacagcattttagctggcctcgtgcctaagtgcaaagaataagtaggaaataataggaagtaaaattttaaaaataatgagaaaaattttgagggcttcaaatacaaatagtggaagacaatgaggtatcttcatgttagaatcgtgtctagactcaaatcccaacccaagccattgctaattttgtcaccttgagcaaatcttcttatttctctgatcttcagtttccttgtctaaaaatgaggcataaagagcacacatgaagtgggacacatgtacagtgttaggcccttctgctcttggctgatgataggagtctggtgaccaaccatcttggtttgcccagggctggtgggcttcccaggacacgggacaaagtggttaccctaggtgggaagcgcgacaggataaaagggtcctcatgcatagacagctcccctccaaattccactcgtgtcccaaacctatctctccaggaaacacacagaagccatctccggttggattcctaacactacgtctcttttcattgttcttgtaacctcatgctggtgatgtgtttatgctgctctaaagttgtgtgctattttctttaaacagcatattagggtgtgagctccctaaggtcagaggtcatccttctgtatttggtaggacctagtctaaccccctcccgatgctcaacttgcaccatcagtcctggctcggcaaagtcacacatctcaaagagatacagttctgattgcaagagcatcagggagtcaagtaagttcttactgaagcctcttgaagaggcaaaacggggaggattacatccttggaaagacagagttaagggctgtaagacttctccttagaaaagattcttctcaaagtcccctgttctctttttcagtctctccttcatcactcctgattcttttctcttgggaatgactcagggtcctttctaagacaggcaactcatcctcctttggatttttccaatttcctttttccaatcctttccaatcaggattgcagaatactccacaaaggctcaggagtccagcaggtcaaacgtgtgtgtgtgtgtgtttgtgtgtgtgtgtgtgtgtgtgtgtgtgtgtgtagctgaagggcaggggtctgtaaacagtttgctgcatcataataacacatgtttcataaataattggtgcttaacaaatatgtactgtcttgggttatctctctgtcacccgggtgggtggctttaggaagaaattagttgtgggtcaaatgcattttacaatgatggaccccagccaggaaaagaacaatcttcctccccctacgagggcttagagtgagccagggagtggaagaaggtattgcaccctcagtagcagaagtgagagtccctaaagggagatattcaagaatgagtgtgtgtgttgggatgtgtgtgggtgtgtatttgtgtgtaggggtggtgaggaggcattagtctgctgatctgggtcaatatagtgaaaatgaagaacatgggattgggcattgaaggcttgtatgaatgcactagtcctaggaccttgaacaaactccttgtctccatgccacagttttctcatctttctttatagagtttttgggaggactaaatatcctaacacacataaaacacttagcacagaacctggcatatagtaaacactcaataaacctcagtgattactgttattagggctgaccccaaccacagctgagaggagtccaggcctcagtaaactctcctgagaggggaccacaaggagctgagggtgagctggcttgcgtttttggaactgtcttaatatatttgaaatttatgctgaaatccagtgtgccaaggtctctcgataaaacaggggggaaaaaagtggaagcatatggtggtctgagtcttgaagaagaatgacttcaattatagaaacaggctgttggagaaatatgccttttcagccccgtcagtcacgaaccttttccaaatgttgacattacgcatgatattaatatactataaaaaatccatgtaaaactggaaaagcccaaacataccatgcaaagcctgagtcctgctaatgccccatcaggattagaagcaaaaattcagttagttctgcctgctagggtttgcagtggcttatgtcaggaagtctatgacaatttgtcatcatgtagaaatatggctgcatctggatttttctaaactaagggaagcatttgtacatcaaaagtcctattaaggttttactttactttactatcaagaactttttgccttttggttctcttataggtttggtgggtaaatccccatttagaataaaggcctatttcttatcctctgagctggataagctattcaggcagagaacaacctttgaagttaagggaaactgtgctatcaagccaaacgtgaaataaaatcagaaggggacccctaatgcattatggaatacaacgcagaatttggccgaaggtgatgctaattttctgctcttgtcaatgaaaaacagacgccaggacgacttgcttgcattcatctgaatccacatggcagcgtcagaaagctggtgagcctggtgggccggggggagctgtggtctggggcaagggctggttcctttgttttcattggcatggcttatggaaaagtcagagaaaatgaatttcaaatgatgggtcaaaactcaagatttgaaacacatttcttccatcctgtaggtctcatggatccatggaaataattttgataactttaactccatttccagttgcaggtatgttgtccatagagttccattaaacaatatttttatttcagtcatttaccattcaatgagtcttttaaatcctgtaaagtcgtggaaaaaagttcaaattggctataaatgattacactaattttctgttttctttccatttcttttctggttttccttttaaaattgcccctcttgcctgcagcatattttgcatcaaaaaatgtatggaggatggaagacccttttcacgcagcagctgggacagagtattgctcaggcaacttgttccctcacactaatttttgtctgcattgtaaaaatattttaaatggttttgcatgctgcatgaaaatgtggaaataacttatactgtttggtggtaaaatgtaagaaattagacagatgcatgaatgctcttatgggcagaagagaagcagctgctttccaaaaacactctgaactttcagaaaagggaacagtcactgattctagaatcaggaggaagaatacataaatgttatctgctgctccttttggttaatttggttatggaaggcagcttctgaaaagggtcacacgcaccgtattttggcataaaaaacagaatcacaaggaagagaagtacctcccccacccccacttgggctgtgggaggaccctcatccatcagcgtctctggtacagggatagctgctggctcagtggctctggccttcatcctggggtcctgctgctgccagggtgctgtcttctcaccttttcaaagaccctcatctctactgtcccatatccatccctgctgaccaaagcaaaactaggtttttcttgcttttcctgggctgagcctcttattgttcctagacacagccagcctggtgagcacaggcaaactggacattggaagacccagctgcacaaagactccttcctgtgagaggcttggagaagactttgctctagacacacaagggagcctgtgggaaggtgagagagatatcccttctcattccaagcctctaccgggaggaaaggttgctcccagagttggggttgtggagctgtttatcagggttgggtcagatggaaaaacagaggactgtatgtaacctaaggtgaagtaaagaatctaaatatgctcagagaaaggcctggccttttgctctcagcttctgggaagtgatctgtgcctttggaatgtcatgtctgataggagtggctttgtttgcctgcaggccttggaccagccagatagtgacaaggtgattttgggtggggccttgggtcacatcaacaagccttagtgaagatgggggctttaggtcatgtggtctcagcttggtctgaggggctgggaactgagcccagttacctgggcagccagccatgcctaggtggtgataagaccccagcggagcccctggatgcaaaggctcgggtgggtttccctgcgtggtgtgttgttgcacagcatgctggaaaagtgatgctgttgttattcacagggagaggacgatggaagccctgcctttggtactctctgggttccgctctatgtgcttctttccttagctgatgttagctgcattcttcccggtaataaactgcaatcaccagtgaatagctttagtgagtcctgtgctccttctagtgacttattgacactgagtgtgtttttgagagccccctgaacttgaaattgatgtcagaagtgaaggtggttttgtagacactgtggctctaactttgcagttggatagaggtggcaggagttcacctgtatttttttttcccctaaagtagggtctaattcacccccatcaagaggtgtattctagaatttgcacacggacccctttctttctcatttctgtgctttttaacagaaccactaactcttataccctctcggccatacattatccactcacattattttcatttgaatcacatactcacgttagtaattccttcttacttgtagctgatgaagtttgtttgtttatttatttatttatttatttatttattttaggttctattaacattgacataccaggcccccaatacatgtgagttctcatctctattagttttctggagctgccataacaaagtaccacaaattgggtgacttaaaataacagaaatttattgtctcacagttctggaggctagaagtcagaaatcaaggtgtcggagggccatgctccctctgaaaactgtaaaagaggcttcttcctcatctctctcatagcttctggtggttgccagtagcagtactgggcactccttgacttgtagatgtattattcgaattctctgtctgcacatggccctctccctgtctgcacaaggcattttgtttttttaaataaggacaactatcacattggattagagacccaccttactccaatgtgacttcatcttaactcattacacctgcaatggccctatttccaaataaggatactttccatgaaactgggggttaggacttctatacacatacacagatgtgtgtgtgtgtgtgtgtgtgtgtgtgtgtgtataggaggacataattgagcccataaccccatccatttcccctcatgaaagataaagctaagtatgtgagctcctgcgcctcagttccttcctctgtgaaatgggaaagattatatcaccacttcccatcctgggaaaggatgagaagagatacagcctctacatgcacagcactgggcacacagtgcagaaataagagctcattgtctctgggaggactgtttctaagtagggtgttttctaatgcatttaagttcattaaaagccaaggtgtgcaacgacactcccctcacctgtgctttctcgtccttctgccaccaggtgccaggggagccaagaagagcaaaaccaaggaggcattgtttcctccagagcctcattcatcaactcgctctgaacagttagcacgctcagacagtcatcttctgcaccttgcctttccctgtgtcttgactgagggcttatctgagagccttttgttcaggctcataattattcagtgactcaggagcccacaagcattacccacggagccagacaagaccagcaagctctgaggaccacctgttccaagtcatttcctgtgtgggcggcaacttcacagggctgaaaatacgagttacggtaaaaatgtcttcaaccctggcgcgctggattgttgaaactcgatggaatcttgcttgattatgttcaggccagacacatttcattatcattctttgcatatatattaaaaactctaacccctttacaaacaaatgttctcaaggggcagacagcacacccttgcctcatgacattgctctaatagagaaaacaccccagtgtttcacccattaggtcagatccacgaacacagagtgcagttgggaaggatgtgggcagtaatgaaggtggtgctttttgctcctgtgggtgctatggacaggtgagggttcaaggatattaacaacaaattttaagccataccttacactacattggagcttaatcaaattctctgttcacagtatgcctaaattggccaatggaacggaaaaaaaaaaaaaaagcaacccacccccaagagttatttatgtcatgtagacaaaacctgggttcgttgactgattatttccactctctagtgatggtcgttgcattttcactctgagttgaattgctgcatttttccataaatatatctgctcctctggaagaagctttgttgcttagccttattgcccttcacgtctgcctttctgacctcatagactgtcaagttcttagttggtgactaaagtataaaagtaatttctttctctcttttttaaaattattaaagccacacatgctcactacagaaaagttagaatgtagatatgtgtgaagaaaagaaaaattagccattaggcccacaatctagggaaaactcattttgggcatttggatggctttaatatgcattcactattaaatgatgaatatgatattatacatagtatactaatatattatgatgatggatcagtgctgatgtgttttaacataaatgtatatgttagtaatgctgctgttttatcttaacagtttttcaaacttgcattgttttgcccttcagctaaaagggtagggaatttgctagggatataaattcattaatcataaaaattatgtcataacagcctgcacagaaatcacaataggatgcaggacatagattagactagagttgagattcttgccccaaccacaactgttcaggctttgaaaagaaaacaaatctttttttttttttttttttttgaaatggagtctcactctgtcacccaggctggagtgcagtggtgcgatctcggctcactgcaaactccgcctaccaggttcacgccattctcctgcctcagcctcccaagtagctgggactacagcgcccaccaccacacccaactaatttttttgtattttttagtagagatggggtttcaccatattagccaggatggttttgatctcctgacctcatgatctgcctgccttggcctcccaaagtgctgggattccaggcgtgagccaccgcgccaggcagaaaacaaatcatttttaagcactgattctaagtcagcattgcccggttaagctcttacattttcaccagaaatcaacccccgagacttagcaagtttgagtgacctgttcccagtggtgctgttctgacgtgtctgatgtcagatcagaagctcaggccttccaacccaacgcataaactttcttttggtataagtatgttctttgtattgcttatactaaaataattatttgttgttcatctgaaattcaaagtgcatggaggtcctgtatgttatctggaatctcagtggaatgaactaggggttttataatcagcatttgtccctactgctgaggctgtggcatgtgagctgttaagtattttgaccgtatccttctgcaaacactggaccattttgtctttcatgcagccgacttatttatgatcaaggagaacggtatagggaaatagacccaagttcatattacaggaagattgtgtgacgttacagaaagaaacataaccacctggttaaaaccttagctgtgtgatcttgtactagttactcaacctcgctgaggctgggattatgcaaaatggggccaagcacacctgcttctcagagttttggccataatgaatgaggtaatgcatactatcccataacgggctctcagctgcaaagggaactgtcttatctacacttataatttagtcaagtcaactaaaatgctgactgctccagtcccatacctacctcccatacaccccagtgactgaagtcaaagccagcatcacacacaccaatttttttttttttttttgacggaatctcactctgttgcccaggctggagtgcactggcgcgatcttggctcaccgcaacctccgcctcctgggttccagcaattctcctgcctcagccttctgagtagctaggattacaggtgcctgctgccacacccatctaatttttgtatttttagtagagacggggtttcaccatgttggccaggctggtcttgaactcctgacctcaagtgatctgccagcctcggcctcccaaagtgctgggattacaggcgtcagccaccgctcctggccacaggaggctcatccctgatggcctcactcagggatgagccttggactttgactggccccaataattcacagagtcatgccttcatttattaaaaaatccctggggaatatactgtcttaggatctggggacatgaaatgtattgtgcctggcctcatgctgcttatggtctagcagggtagatgggcattaagcaaatgcttgtgaagataaggattttagcacaagctgaaattagtgttatgaaggcaaagtacagagtggtatgggaaagtaatgcaggaggaggtgaggtagaactgtgctttgtcatccacacgagccccgattcctcctgttcccaaccaggcgaacatgctgttcatgcaacgccaaccaaaattaatggggaaagggagtctggggatataaaaagtgagataaaggggctacttattttttttttactgttgtttctgcttgtttatataaaaagatcctttcaacatttacagagctttaaagtatgatgtgaaaaataagtactttgtacttattatggtgcctttcatctgagttgctcataagccctgcagacattgcctcatccattttcagaagactcctcaaaggaaggtaagaagagactcttgcccccacttcacagatgcaaagactgaggcatgaggaggtaacaggggctaggagagtagtgttggatcaggggctgaggtgcctggatcctaggtctggctttgccattcaataactgtgtgactttgggtgtgtccctctgggttcttattaggaatttggaatagatgattcccaatgtctcatacagtttgaaggatctgtgatggtgtcagggaaaatgggtaagtgtcacagtgctaattcctgggacataattcaagtcttcactcatgacttcagcttcagaataacatttctgcaagaaggccatccagaaagatggagacaataactgactcctggagttggaaggacccttggatggctccgtgtggcttaaaatgcctaaataccagaattgttgaatgcttgctcatgacacaggttcttggaacccaacccagtctgtctatccaaatttataggccagaggcctgaggaacaattaatgaaatcatcaagtctggaaagcacatagtccaaatcagtggtctcaagctgggctgcacactggaatcaccagggagctttgaaaaatggagatgccaggatcccactttggatattttgatttagatggtcgcaggtatgtcctgggtatctggagattttaaaatcgtcctggggattctaagggcagccaaggctgaaaaccacagacctagatcaagctctcttgtgatgctgatgaaatgaatgggcttgatgaagctaatctcacccatgagaaaccatgggcagagccactgctgacttggggggcaaggcagagctggatgccccccttctgactctacctcccactctgtccactacattatgtggactcccataatgcctgagtgtaagagttttctttttaatatgcagaaaaaatttaaattatattgggtaaaaaaaaaatattaaaaaaatttaaattgggaattaaatgaagcatttagaaatcaaaattttctgtgtggcccccatcaccactaccgatagcacaaaggtagttgaaagaaacataaacttggaaaaatacttgcaacataaattataaagggttatatgagaacctttagaaaccaataagaagatgactaattcaatacaagactgatcaaaactaatgaatagaaaatagacacacaaaaaattttaaagggccaatgaaaacataaaattagttttttattcttctttaattattattcttaataattaaagaaatgtaaattaaaatattagtgacacattgatactcattcatcaaattatgaattattgaaagattgataaaatccatttgggtagtgaaagcaactactggtgagaagcaagctggcataagatttctggagagccattcggcaatatataccaaagccttaaaatatgtgtatattttttatttttatttttactttttttgagatggagtctcactctgtcacccaggctggagtgcaatggcgcgatctcagctcactgcaacctccacctcccaggttcgagtgattctcctgcctcagcctctggagtagctgggattacaggcctgcaccaccacacccggctattttgtatttttagttgaggcagagttttgccatgttggctaggctggtctcgaactcctgaagtcaggtgatccactcaccttggcctcccaaagtgctgggattacaggcgtgagccaccacattcggcccaaaatatgtgtatactgtttaacttggtaattgtatctcaaacaaattgtcttaagagaaaagtgtgttcagatgtatacgtaagaaaattattcatcataggattatctatcatatcaaacctttggaaataatccaatcctccatccgtaaatgtttagtgaaataaatttttattgatccacatggtggaataacatgcaactattaaaaattgtattgcagatttacacttgttgacatggaaatatgttccatatatagaagtgattagagaaagttaccaaactatatatcacagaagttcatttttcatgtatgagtggctaggtttacattgacaacaaaaacctaggcttggggtcctctactggttttgcctatggtgaccaactaattatctgggttttcccaggactggggggttttctgggatgtgggacttaatatccctgagacaatcctgagacaatcctgagaaaactgggatggttgattgccctgatcttgccactgagtcactagcagtgtgactttggacaaggcttttcatctgtttgtgaaatacagcactttcctaaaataatgaatttgaaatggctgtggctggaaaattggcccccactcttatattaacaatgtttccattgggtgttgggatttggggcattataaaatttatttttaaatatttttttagaaggtgtactcataattttcataatataaaaaacaataaagtcatctctattaaaaatactcctatgggtcaattgagttctattttcagtactaagattatggtaaggactataaaaagtgtttccataggatgtcaaccacaaatatttactacagcatacgagtggaaacctagagattcttgcaagaacaaaaggcaccagggacaattttcccctcaaactgccacaatatcttatgtgaaaaatgacaaataaatgaacagaaatttactctcctgttttgcagaaattacaacaatcctcatatatagattcaatgcagattagatttaaatctaaaatggtttatttgtacccaaagttaagaaggatgcaacaaattatgaacacattttccaagtgagtaaattttgtttgaaaacgccaaccttgaaagtttctctattgatcacttttgcattgctctttaggttaaatagtgatagctgcctttcagagagccttatgatgacggaattagtttacaaagggaagagtctgacagacaaaggttttactcagtctagagggctctctggaggaaggtttctggcaaaggcttagatttgtgttgagcctaaaatttgcatggtttgattatagatgacaataggcaaaaatttgccatatgttctatgatatcaaccatggccccaaaagtgactaggaataaaacatactcttcttagaaatgtcagaattgcacattttgggaggcttgcaatgcaaggctaattctgatgcccctaacgcattcaaagtcctgacttcttgtagaacaggtgtcactgccaatttttcacttgtcctgtagcagctacagaaattggaggtgtcttcaaaaggcaagacaatctacaggctttgccctgcagggtcctggccaccatccctccagcagaatccaggccagccccctgaacaattcacctcaacgccggatacattttttactgctacaacttttgaaatttcctccctaacttctttctttgtgctctgttctccaagtcaggaaaaggcagacagtgctgaaatggtcaacagttctgcctttgaaaggcactttgcttccttctgtgtctggaaattacacctggatctcaaagcatcatgtgttgtttttgataagaaagtctgatgagagtgagtccatggtttgattcacatgctacaattgctgacaagtttccacatgaatatttcaatttagtgatactactaagcagtatatttttcttatttaatttcatgtccccaaataaatcttaggaaagtagaaaatgtttgcaaaattttcctccacacatttagagtccctccatgctggcagggtgcccagactgctgcagagttagagcccaggctgggctgctggaaacgcaactatgggacggctaaggtgcaagtctagacctttcctgtctaaaaggcactttccgcccagaaagatgaaaatacaaattgcaattccagatacagacaattaaaagcactgtgtgtagtttctctggatgctctaaaaaattatgtgtgaatgcaaatgtctctcccttaaacattgctatacaatgataatggtttgggaatagagtgcctatgtatatattgaaagctttgaacttactttactataccaaactagtttgtcaaaatataactgtgtcaaaaagttataaagatgaaccaacctttcactccccttcaaactaaaatattaaaattgatcaaaccctgacctcagttaagggcttggttctgccactagctggataacaggagacaaaggatgtcagggtcactcttctaacagtttgtgtgtttatgtgcattttaaaaaattatgttcttgtttttctttctcgccagcacccccctttttttttgtaaagcaactgattaagtaaagaaaaatcatctatctggttagggaaaactggtagaatctgaatgtcactcacttctcagatggcaaggatttgtacaaaaccttcatataacaattgtaaattgtcactgctgtgtaagaccgtcaaaaagtgagtgagggctcagagacacagagggacttctagctcggctgtatcgctttcttgttctgggaccatgggcattataagattttgaaaacggtttcttcatgggaataatacttgtatttatctgagataattgttgacaaatataaactagtaaagtcacaaaaaatgcttatgaaggaatccggaatatactaacttcccacttttattcatggtcagtgtcatcgtcatcattctcttcctcccaggctagttaacagaagggtaaaaacattttgacctacaaacataaaatagtcatatcatcctccaaagtaacacagttaatacactatttcagaagcaccattttagacactttttgcccagagaaaatcttaaagaaccctattgatttgttgtttcacattttccagtattcagagaaaatctgtttagactcccttgaggactactgtccactcagtagaacccatccttaatatctttctccctttcccatcataatggtgactatggagtgatcttcagaaaccttagcacaaatgcaaccccagagatgtcttcagaacaaactaaaacccactgtaacatacctggaggaaaaaatgccactggaatcaactttctgttaataaagtaagtttttccccaaatattcaaagtgtgtaatacctgtaaacactttctccaaagccactttcaacccacaaataatatttttatgattaatcatagagagagagggcaaatatatgcagaactatgtcacactccctcaaccgaactttctggtcatttcccccgttagggttgggagaggaggggtggtgcaggggatggagagagaaggtcctttgtctggaacttttcattactgaggggttttaccaaagaagcaattcttttcacacgctatgtctcaccttgagttcttatccgctggggacatagttgatcaatgatgtaattctacaattatttaaggatagtgattcttttattctcacaaagggtttgctgaaaattaaaagaagcctgcagtcatttattttaatctcccaagattgtttattgttcctacaagtcaggacagcctcatctttggaaaacacattccaggagaaaagctgataaaatgatcgcattgttagatgggtggggttttgcaaggtagaatccgttgatggtcttttaaagcagcactttatattttatcttatggtatttctgaagtgcatggatggtcatttggtgcaaatgataactgttcatttacctttagagactttgtaatcattgagaagacaataaatgtatataaattataaacttcaataataagttcttgaaaatgttcatttcctgtgccatttccttcctatgcattgccatacagctctttgtatgtataaatgaggaagaagatatgcacttaagatgatttctttgaatattataagcctccccgcttccaatacaattaatcaccttcccatgtgtgatggaaactgcaaaatactttttttccttgtgttataaaaatatcccttgattgtcaacttttagtttttaagtgctttgatctactttgaatgtgaagagtgcagggtccccaaactaagtgggtggcctccaccctatggtgtgagaaaaagctgtgaattttcccccttattttttatgtccatgggtttcttatttagaggaaaatttaatacacaattggtacctttgcagttagctcacccaaatgttatttgtttaagaggtatttgatgtccaacataccgagtgattttttttttttacaagacttatttaagctcttttcctaggaaaaagatgttgcctttctgccaagggcatattatcttcaaaaactggcatttttagccttttttccgcaacttgaattttccacatcttaaattgtctcaggtctgtgaactgtagattgggagaattagaaaagatcttccttcctagtagctgacattccttgcttaggaaactttacacagtctccctcatttgatggaaaaagcaatcattaagcattaatgggagaacagcaaaatcttcaaaatctgactcattttagataaacactttctagctttcaaatctattctaagccactataatgctcaccatgtttaaaatggaaagaaatactttccgaggtaaatacccaatgaaccgaaataaatagaaatccagttatgatgaaaaatattaaaggaaaaagactaaatgaactttcaaaccctctaaagagagagtagttcacctgttataacacgtgtaaggaggtgaataaattgtgtcaactaatttcccaaatacaagatcaactctcatatctataggggagataactaattgaaccatgaccccagcaataaaattcagcacatctctgaagatgaatattaacgtggtttgggagagaatgtgcttgagatattaatgtttttaagaaccaagttgtggtttcttaggctaaaattgcatggctacatttgctgtgccaagaatagagtttcatactctccgaaaacagcatgactccagtgagatgtttggtcggggatcccaatcgtgtaagatactgtgcaattatgtctacttccttcctgtccctaaattctaccaattccaagtgcctttggaacagtgtgatcagcacttagataaaggtagtaagggcccaccagtccttggatgttctcctgggcttcatgaaagaaaagtctgcagcaggtaaagactggggtcaatggctccctcagtccaaactggacagccttgggaggaggccactcatgaaaatttggctacagagatatgttagccgtctttgtaaccagtactttaaaaataaaatacaataaaataaaaagattcttcaagagtactcatgcaggcctcagtgttaatgtctgctcttggacttgaaaacattcttgccccctccataaacattctttcccactgctgaaagctgttgaatgcttgtcaggcttattcaaaatttgatgaccttaatggaaacccccaaagatgacaacagataaagaataaaaccaggacatatcacttgtaaacacagtcaatgcatccatttcttgtttttcaattaatcatctcttgagctaagagcttagaaattccattcagatttagacattcttttaagagtatgcgtctgatttccaaattaccagcccgatagttctgactaatggaaaataatgcactactttgcttcaggcaaagtcaagtatttgattttcatagaaccaactttcgattaactattctgtggctgtgtttatctaccatgacctttagctgatctgttccaaactggtcaggaagaaagaagtggtcttagaggaagcaaagtctgttggaagtaactctgaactggagtgtcaagaaatctttcatttcttctgttcatgatttttgataatttatcttccctgtgtcttattttctcattctgtaaaaagaaggaaatttaaaaaatggcatcttacagggatcaaagatgctaggaaagatgaaaaaggagtaaaaatgtcattcctgatggacctcaagggcattatgcttagtgaaaaaaaagtaaatggcaaaagattttgtgctgtttgattccatttatataacattcttaaaagaacaaaattatagagatggagaacaagttggtggttgccagggttgatgatgctgcggtatgaatgtaagaaggtgacctgagggggtcacagagtgacctctgtagtaacagagcagttctgcctcttagttgcactggtagttacccaaatcaatacactagataaagttgcatagaatttcacgcacacacacatgcacacatacaaacatacaagtattaaccacatgtaaaaaatggtgaaaattaaacaagatctgcagtacagttaagagccaaacaattgatgttctaacaacatcagtttcttggtcttgatattgtactgtggttatacaaaatgttatcattaggggaagctgggtgaagggtacactggactctgtgtattatttttgtaactttctgggaatctatagttatttcaaaataaaactttaaaaatgttattatgtacctgaccttaggattcttcttaaccaatctcatgttccctgtgtgtatgattacaataaaaataaaagtagaagtatttttttcgaaaaagagaaagtggtgagagagtggcaaatgttacatggagtgggatgagtcacaggaaaaccatgaaacacagttctcttcttgtaacttaactttgcataaaagtgaatacaatgattccttgtttaacaccactctgaacttaaaagcaaaattcttaggaagagccttttgaaatctaagacttttgtaagttgagatgccatggaacatttgttccatgggctgcctcacaaaaacaaagaatttgtagtaaactaagtttgaaaatgttaaacataatttttttccctggctctcttttcaaaatgatattttaaaaaaacacatacctttgaaaaacagactccagacttctacttcctgaaatagtagatgggatgatgcagatgatttggaccaactctatgctaagacaacttgaaatcgaggcaaaacatacacacacgtatcactgtcatcttcattatcatcatcatctaattgaaggcattggaaagctcttaatgcagtaaaggccaagatccaagagaaagcagaaacagagagatgaaatttaccctaaggcagaggccagtactggaagagggaggagagttctcgagagagaacttgcaaaggtaatcagggcctttgccagcttcgcgtagtgagtgggagaaaaatggaagtccagggcccacccagaagaagcttctggataaccttccatgctttagattaagacaggcaagtactatatcctgggagcaagggtggatgaaaagtgaagtagccttacaagaactgaagtctgttttatgattatctcagtccttgaaattgatcctagaatgctgatacttctggccacctgctataaagaaaaataaaccttccttctttatctaggttaaagataaagtcttcaatcatgtttatacttttttatatacatgagacagtcaatcaaacatattaaggcacagagaagaataagaaaagaaaaatagaaacagacccaaaggggctccagataatagttaccaagcacaggatttaaaataacaatgcttaaacggttaaggagattacaagaaaagataagaaattttgatgaataattgggacctgtaaggataactaaagggaaatgttagagctgaaaagtgcaatagctaaaattagaaacagtggaaggactgaagcatatcaaagagtaagagagagtcagtgaattgaaagatagatttaaaaaaattcagaaggaggcatagagataaaaaaaagtatgaaaaatatagaagaaagggtaagagacagaagttctaacatagatgtcatgaggttccttttaacagaataacagaatgagaatgatgtagatacgttatatgtagaggccttgactgaccattttccaaactggcagaaaatatcaagctagaggttcaagaagcaagataaattcagagaaaactacatcagagaaaatggctgaaaaccaaggacaatgagaaaatcttaaaagagactagaggaaaaaagaaacactaattttggagaaggaacattaattcacagttgctgccttgaaaattaaaaaataataaaatgataaaataaaataaaaataatgaaaaccagaagataataaaagaaattctgaaagttatcctccaacctggaattctatatagggtgaaaatattcttcaagaatgaagacatgaaaacaaaataaagacaatttcagaccaagaaccccaccaaaacaaacaaaaaacccagggaatttgtcactagtaaacctgaactaaagaggatattaaagatatttttcaggaagaaggaaaatgattccaggaaggagcaaaaagcaagaaaaggcaaatatgtctgtaaattgaaatgcatcttgactataccaatctataataataacacttgaatagaatatgaaatattccaggcatggtggtgcacacttgtaatcccagcactttgggaggttgaggcgggtggatcacttgaggtcaggagtttgagaccagcctggccaacatggcaaaaccccatctctactaaaaatataaaaattagcagggcattgtggcgtgcacctgtagtcccagctacttggaaggctgaggcaggagaatcgcttgaacctgggaggcagagattgtagtgaactgagattgtaccactgcactccagcccgggtgacagagcaagaatctgtctcaaaaaaaaaaaaaaaaaaaagaaatacgtatgcaattaaaataaatgacaacaacagcaataagttagaagggagtgaaaagaagtctttgcattaactgagatgaggcaaagagtactgatttatatcatatttgagtaagtcaggaaagccagctgcaatctctaggtaagctgtaaaaaaatactgaaagagtgttaaccatcacactcatattctacttcataatcaaaatagaataaattttaaatattccataaaagcaaaagaacacaaggatgaagaaaaaagaaatatagaaacaggtagaagtaaaaagcaaataatagaataataaattatgccctaaatatatcagtattaatagtagcatagtgattgtaaactgtgttcttagggactgacaataatactagccattaatttgttgaagtaatactgtctgctaactacttaacatgaagtaactcatttaatcctcagagtattcatacccagcaaagactgttattatcctcactttaaacatgaggaaacataggcacagagaggttaaataactgtcccaggattacccagcaggtctggagcacagctggagtttgaaaccatgtgtttaactttgagtgtgatattctaaccaccatgttgtactcgatgaccctgcctctcctgtggtagcacaaagaaagatctagacttgtctgccatgaaagaaaatagattgtttccgacttcaggcatttccttcagattagataattaagccaccaacatatttaaacttaaaaaaaaaacatatcgagagaagcttggttgccacgtatattaaaagccttaagaaatttcattcttggacggagcatttgcacatttctgaaggcatcccaagaacaaaataagtatagaaaaataaatagataaacagagatgctcattgcaggcttatctgtgacagtgaaaagatcaaacggtgtgaatgtatcattaatgatggcacatttagtgaaataatatgtggctagtaaaagggtattataagtaaaagcaatatatatatatatacacacacacacatatataaaataaaaagttatattaagtggaggggaaagtaaacaagagagcatatgccagaattatcacaaactggtacaattcccaattcctatgtattcttgacaaaaatcctcagaggagaaaaagaactatgcaaaatattatacattcttgaaggaaatacactgaaatattagaactgtagcatgtatatttgggttgcaggatcagaaatgcatttgcacctctttttgtatttcccagttctccttggggctcgcattaggattaacatgtaagttaattcatataaaagttgtttgggcgcagtggctcacgcctgtaatcccaacactttgggaggccaaggtgggcggatcacaaggtcaggagattgagaccatcctggctaacacggtgaaaccccgtctctactataaaaaaaaaaaaattggcctggcgtggtagctggcacctgtagtcccagctactcgggaggctgaggcaggagaatggcttgaacccgggaggcagagcttgcagtgagccgagatggcgccactgtactccagcctgggtgacagagcaagactctgtctcagaaaaaaaacaaaacaaaacgttgttgtttgaaatgatgacactttctgttatctgatgagggggatgtgctttcactgagtgtatttagaaaaggactcattaaccaaagagggcagagctcctgctgcgatgtaacctcttcccccaccaagtggctgaggctcactcatcttacccttttgcctctagtgtggaaggaactgaaggtaaggccacatggttccaggctgatggagctcggcagtgttcagaagcagctgctttaaggaaagacctgctctggggcctcatggatggcatgagtagagaggaaagagaacattcgagaaaaaagacatcatcaacatatcctatgtgaggccgatgctttctttgcaacttcaagtgatgtttttgtgggatcattagtctatccatctgtagccatgcatccagcaaattcagtatctgtcacatggaaacactatgctaggggcccagaggggagaaaatgagtttaaggaacagataaagattttgtcccagataccaatcaatcatgaaaaaggggacttcactccctttgtttacgaaggtccatttcagtttccctgtctactgcacacattatatcactgagatgtttggctttcctgagaatcgaagaacccgctggaaaatagtgatgtcattctgaaggtagtttctcaaagtgtagtctatgcaggaaggagcggagggacagtagctcttctttatctcaagggtccttttgttggacactttgaggggtccttggttagggttgttgtgaacttggctgggacaaaatacatctttatttttacaaactccatctttatttttacaaactcctaactcaaacatagcattttcttctatcataaatatagaaaagaaattgcagtagtattagaaatatgtgtaactttcagccaggcacggtggctcacgtctgtaatcctatcattctgggaggcggaagtgggcagatcacctgagcttaggagtttgggaccagactgggcaacacggcaaaaatgtgtctctacaaaaaaatacaaatattagcaaggtgtgcatctgtagtcctagctacttgggaagctgaggcaggagaattgcttgagtccgggaggcagaagttgcagtgagccaagatcgcaccactgcactccagcctgggtgacacagtgagatcttgtctcaaaaaaaaaaaagcgggggggggtaactttctcaccagttgattgaaataatggatagcttcaaatcacattatagtgcttacaaatgtaccaaaatattgtgtatgctcatcactaccctgaaattacagtccttgggcttggaaataggtcatgttatttaatgagtttaatgagttaataaagagtcataactgttattattcacaattttttagagaagcattttgataactatattaaccaaaattctccagagaaacagaatggttggcaaactggagacttaaaagagctgacggtgaaatgactttccagcccaaaggtaatcaggcaggaaggatttcctcttacttgggggagggtcagccttttgttctcttcaggcctcaactgattggatgaggccccactcacatcagggagggcaatctactttactcagtccatcagtttaaatattaaacctatccaaaaacgcctttacagaaacacccagaataatgtttgactaaatacctgggcattctgggatccagtgaagttgacataaaattaaccattacaagtccacctgttgttaacttggaacacatactcatctccttaagatgtatttaattaatcaccacatgaagacagtagcaagtttataattctgcctgacatgatacagctttcctgctcacaataaaaaatgtgctaaccctttcccaagaggaggagataaagcccttgagtaatgtttactcttctccttgatagtctgtactcaaaaacagtaatataaaaccaatacattatatatttcatgataaaggaataatagaaggaagaaaacacagaaatttgccctatatctgtgtgcacatacatacacacaagtaaattcagaacaaaataaggaggaaatattcatgacaattacagtcttcatttccataacaggtcatgtaaccgtaactgctatttacaactcccttttcccactattcattatgtattctctttgccttcagcaatcagatcagctagtcatggttctttacttggtggaataatccaagccttcattccagaagggtctgggccactactagccctgcctgaagtgggtggttgtagtttctcattgaccttaatgacaaggcgtggtaatactaaagacactctaagggatctcctatgttccaaacatactcttccttccctccaagtggtcccatttccccttactcgtcaggatcaatcacccctaccagcagagtaactctcttctatgcctgttcatttagcattatgaggagtacaaagtgggagaatggcaatcttaagttccagttcaatgaaatcattgtgtgtctcctggtagaagcattcttcccttcccaggagctgatatggtttggctgtgttcccacccaaatcttatcttgaattgtaactcaagatgagatttgggtggggacacaattcccatgtgtcatgggaggaacccagtgggaggtgattaaattatgaggggcgggtctttcctgcactgttcttatgatagtgaatgagtctcaggagatatgatggttttaaaaatgggagtttccctgcacaggctctctctctttctttgcctgctgccatccatgtaagatgttacttgctcctccttgccttctgccatgattgtgaggcctccccagccatgtggaactgtgagtccattaaacctctttcttttttaaattgcccagtctttattagcagtgttaaaacagactaatacggtaaatgagctaagacctctaggccaaaggacataaggtcatcagagcagaaagcaaaggttttactagtgggtcactaaggctaacagtgaatggtgctattttctccctttgatttgcaggcccatcaattctggctatgaggaaaacaggaccatgtattggaagctgattcagagcctacacagccttctggagaatcttaccccagccctacaagatattgccacctagctgacactgtaactgagtcttcaaaatgccattccactgttttatcaaaccagttgtttcaagatggagggaaacataagaccagtgaattccacgagcatgggcccactgcagcacttcatttgctgtgaagtgagttccttgatcagaagcagttttttatggaataccatgatggtggataaggcaattctttaagtccacggatggtagttttggccagaagcattgcatgcagggaagacaaatctgtatctatgccatctattccagtaagaaaaaacactacttcttccatgatggaagtggtccaatgtaatcaacctgccaccaagtcaatcacctggttggtctgacttggcaataggtcttgatattgaatgagtcaataaggatacataactgttactattcacaaattttaagaaactactttgacagctatatttcaatataattgcctttaacagaacaaatccactgagtgtggtgactcatgcctgtaatcctagtactttgggaggccgaggcaggtagatcacctgaggtcaggagttcgagaccagcctgaccaatatggtgaaaccctgtctctactaaaaatacaaacattagctgggcatggtggcatgtgcctgtaatcccagcaactcaggaggctgagacaggagaatctcttgaacccaagtggcagaggttgcagtgagccaagatctcaccattgcactccagcctggacagcctggacaacagagcgagactccatctcaaaaaacaaacaaacaaacaaacaaacaaaagaaacaacaacaacaaaaaaaacaaagcgaattattggtaaaatactggatgtatcttgtctttgattacaattatagattaatttagaatgaggcaatatcttttgtattttcttactggctaggcaatcgggaatagtcttctataagtggtgctaacaagactattttatttttcttttctctccactcagccatgtccccaatattttggacctgaggtatgaaaataagtaccttatttctactccccccaattgttctattgaatctagttctactgaaataattacatctctgttgctgcattccaatcatgagcttgattgtaatctcagcattttaggcacagtagaacaaggaagagctttccatcagaagtgatcgcaggagacactgttcattagttcgactactatttttcagagcacaccctgaaagtcaggagtaataccaggtaatttagggcttcaagaatggatgaaacatggctacaacagtaaaggagcttaatcaagcaagagagacaggcatgtagaaggccctgggaacccagaaaatggagcaggagactctgtctggcacaaggaaggtggctttatggatggaggtacatttacacctggtctgtaagaatgggtatggtttcgcatagtagaaaagggacaagggagaaagactggatacaaaagaaggggattagtggtggagcaattacaattagaggaggcaataaaaggagtggggacatagtgtattttagggaccacaaccagtgtctatggagctagaataaaaattatccgggtaagaagatgaagttaggtgttgctggaaaggtaggatgccgtggagactggacttgggatttgacaaccagtaactgaaagccatcaataacttctaggcaggggaataacatgatcagatgcgtgttagaaagatgactcaggagaccacatatttaaggaaaacaatggaatcacaatatcctgggaccattctgaatttggggaaacaaagagagagagagagaaagaaaagaatcaaagataccttttgaatgcctagcttaggtgagaggtttggtggtgacatccctaatgggggaaaggtcaagttagaggcagagaatcaaggtctggagatctagagagatcctgagtctgggaaaataaaggtatgagtcatctacatggaagtgatagttaaagctatgggaatgaaggagctttcctgggagaacgtctagacttgtgatgtgaagagccttgaggacaaaacccgggggagcactaacgggtaagagtggtgccaagaaagatgagtcagtgagggaaacaaggagaggaggcagaggatcctacggagaatcaagaaatgctataagaaattaggaggcaaactcagagcagcaaggtgggtgggagaattgcaataagagcttccaaagtggttgtggaagctaagattagaaatttgaattctgggttgggcacggtggctcacgcctgtaatcccagcactttgggaggctgaggcgggcagatcacctgaggtccggagttcgagaccagcctgaccaacatggagaaaccccatctctactaaaactacaaacttagctgggcctggtggtgcatgcctgtaatcccagctactccggaggctgaggcaggagaatggcttgaacccaggaagtggaggttgctgtgagccgagatcacgccattgcactccagcctgggaaacaagagcgaaactccgtctcaaaaaaaaaaaaaaaaaaaagaaagaaagaaagaaaaagaaaaaaaaaaaaaagaaatttgaattctggaggtgaagtgacattgtccacataggacaacatccgggtgctgttgtgggaaatgttgagctgagatgtaggtgaaaagatctagcaattcaaagtcaagggtgattcagttcctccaagaagaggtttacaggaggttatgcactgcttgagaggagcacatagatgagatgacaagtcacttgctttcagaggcctgcagaccaaggtggcacctgcattttccccacaatggagtggcaagatgaagaaagaccctccaacatgaaagtttgttttcgggttggtttattgcaatattgcagttggtgctccttgtgactgtgagatagtcaaggctagcgaaaggtaatatacccaaggtagagtttgttcaaatctatttggttagatatgggccaagccatagccttggcttcctgaccactaagctctcagccacctaagaagccgtcttcttctgaagcccattcctatcaagagcctattcctatcatttggtacgacggtgagctatccggggacacgcatgaagaggcaaatctcttcccaagctccatcttctgtagaagccaagcttctggtcctgctcttatctttttcatgaacattcgccagtccctgctgtcactcttgctccccacagtctccatctggcccctcagccaggttccctttgaaatgtaagttatattgtagcactcccctgcttaaaactctattgtggtttcccatcatgcttagactaaagctgagggtcaaggccatgatctaaaggccttgccataatctgtagcagtggatctcaatgtagggtgatttcacatccacccccaagatacctggcaatgtctggagacatttttggccgtcacaatttgtggggagaggttgctaatagcatctagtgggtataggccagggatgctgctagcattctacagtacacaggactcgccaccagctacaatgacaaacaattatccagccccaaatgccaatggtgccaaggcaggaagaccctgccctacagggccctcatactctggtcctgcctatcctgcgtaccctcgctgatgcattcctcctgggtcactctcatcctggccagtcatgctttcctcagatgcaccattgctaccttaggacattttgtaccttcttcctctgatgcctcccctaaatgttctccaggcttgccccttctcactgtgcaggtttctgccaaaacgctgctccttaaggctttctccaattctataatctaaactagctcctcctctcccactgccctcctgctttcttcacagcactttgatcatctgaaatgctatgacttaatggcctcgttctgtctttatcatctgtcttctttgctgggaggtgagctccctgagagcacggctttgtcccatccccagagcagcaccagcacttggtcactcaagagatagctaccaattaagtaaagggaagaatgcctgtctggggcctggctccctaagatgctgatcctggggtgcaatgacaggtgatccctgactctcttaatactcatccaacaaggactcttcaattcgattttgaagctgtttggccttacatttgcctaacacccacccaacacagcataggaaggccattggatccaaagggttacaagtcataggaccaaatgccaggcatcttggatgagcctgctttggtcaaagaaccttcactgcattctccttcactctggactttgggttttcccattcatgggttgggtagcatgaccaacctcaaacactagattcaagtgcaatttccaaccttgtttggactgtatcacgcaaagcacacgcacgcatgagagtacacgtacagggtcacagacatgttatcatatagggcatagatcctcttttagcaagccaaccacagtgttggtcaaactatttctattacaacataaatgcaactcaaatagaagcaagtctctgtagtctgagagttggggagaggtgagcctggtgaaagctcttcagagtgtcccacgggaacctagtgttcccaagcagggtaggtttggggttcaatttaattcatttacagtggaaacattttacagcatcgcatgaagttttcttttataaagtaaatttcgaacccacccatcctcataacttctgatctcctgtcagtaccagttttcttttttttttcttttctttctttctgaagagaggtctccctagggtaaaaagtaaaaacagcttttcctggaaaagttcatgctaccctcatttaccttttgcataacaaaagcccagactctaattctgaatagctgttttgtgtagttgaaccaggtgtcccgcttggagagactgaacattggaagtcagagaaatgccaatttgctgtgtttcaaaatactttgtttcaattgctgccaaagcctggggcaaaatgctataatctatttccagttgtagcttttcagctggctcagcctattttttaaaaaatttattaacatgcccaagtgacagtatcacttattaaccttattgatctgggaaaaattttgttaactataaaacatattcattatttggggttagtactagtgacttcttgacagcaaaacatccaagtcttagaaggtgaaaactgatttataaatacatagcaaacatgctaattaaaatacatcagtgatgtatgtctgtagattaaataatcagatgatattaagtgaaacggagaaaggcacgttgccactgtatttgaggtagactactgacacatctgattacaacatattttcaatttagagtgtgagagagacattctaccattgttagtcacatcacatctggtcgatccagtcctatatttttctgaatgtgccacatttgcaaagaaagatcttaaggaaaaggcagcatatggtttgctaactaccagagacatgaaaggctttcagataaatgcataagtctcattcattcaacaaatattttctgaggatttactaggggctaggtatgattgcagatgctgagtctgcaaagtaaacatatatacttatgtgaacacagtattcagcacctggggccctgcactgggattttatcagaattcttagacagcatttggataagcttattcctcatagatctctgctttctctctccaaaggatgaagctgaagactggagaagtgtatacaatggaaaggaatgggatctgtagtcaaagatgtggaatcaaactttgacacttgacaaactgagttggccaaatggttttacatccttgagtctcaggatccttctttataaagtaacccaacctcatcagggtggagtcatggcaaaacaaggtagggtatatacattgctggtggaatgcaaagtggtacagccacagtggaaaacagtttgatggttcttccaagagttaaagctaccatacgacccagaaattccactcctacctacatactgaaaagaattaaagacagatgctcaaacaaatacaggtactcctatgttcacagcagcattattcacaagagacaagagatgaaaacaacccgaacgcccaataatagatgaatggataaagaaaatgtggtatatacagacaatggtgtattattcagccctaaaaaggaatgaaatttggatacatgctacaacgtggacgtacctcaaaaacattacacccagcaaaagaagccagatgcaaaagaccacatactgcatgattctatttatatgaaatatctagaataggaaaatccacaggaacagagagtagattggtggttgccataggctgcgggagagggaataaggagtgatttttcatggccacagagttcctttcaggtgatgcaactgttttgcaagtagatagaggtagtggttgtacaacatcgtgaatgtactaagtgccattgaaatgttcacttttaaaatgatcaagattatttttgaatttcatctgagttgaaaaaaaaatgagtgtatatgaaaatattccttatatgtttttagtgacttacccagggtcactcaggtggttggaagatgggtggataaaaggctatgtagagaggtcagagggagtctgaatcttctagtgactcattctatttatttattaataatcgagcaataaacgtatatatttgtgaacatcatgatgctttgatacatgtatcccttgtggaatggctaaatcaagctaattaacatatgcatcaccctacttatcatattttttggtagtgagaacacttggtatttacactttcagcaatttttatgtataaaacatactgttattgactagagtcaccatgctgcacaatagatctccagaactgattcctgctgtctaacagaaattttgtatcctttgaccatcatgtttcccaaccctcatccccagcctctggaaaccaccattccactctgtgcttctacgagtttgactttttcagattccacatatgagtgagatcatgtggtatttgtctgtctgtgcctggcttatttcacttaacacaatgttctctcttttttaaggctgcatagtattccactgggtacatataccacattttctttatccattgatgaatctttaggtcgatctcctaacttggccattgtaaataatgctacaatgagcgtgggggtgcaggcatctctctgacataccaattttatatccatctagtgactctttcttgacagagaaaaacttttctctgaacctcccccaaattttccttcaggtctcactgcccaaaacgaggtcacatgactatacctaaatcagtcatgacagacaaatggagggggttgtcgttagaccagtcaggcgtggctaatccctttgcacccatacggtggccaagtgtgtgtacttaggaggcacacattttgtgctgtggagaaaggctgaacttcctcacaaagactcagaaacacttggcaaatctaaaggacagtcaagaaggagacataaaacagatacaaaactggatacaaaatatggtgactgcgttaagaagacctcccattggagacagctttacagaagagatgagagtaggagaatgatttagggagagaggtgggtggtgaatacagtgggcccttgaggagaaaacacctgggaagtcctggcttgcaactcctactctggaggtgaccctggaaaagtctggatttaccctgaatgaaccgaactctccccgagcttcatttttcttatctgtgaaaaaagggtagagacgccttcctcacagagacactgaaagaattatactcggagatggaaaaaaaatactgcctaatttatggtaagattagagactgtttagtctctagtcttgactgtcatcccaaaatgacatgattaaagatgggttttcactttataataaatattgtttagtaatagattaataaaccgacgggcttgaaaacagttcaaatatattgaaagaataaaagaaaagaaagaaagaaaaagagtgagagagaaagagagagagagaaggagggagggagggaaggaagggggaagggaagaaagaaagaaggaacgaaggaaggaaggaaaagaaattatcccttgaatgcctgactaccttcacacctaacataatcggaagcagaaattctgattggacgctgagttcctcaaaatcccccaaatggagtaatcactgttggttccctgcccagctccaacagcaccctgccatccttagaaatctccaacacatacaccatagacttggctcggaaccactcttcagggtattcatttcttggttccttatgcccaggactggacacataattttcaggacccactgcaaaatcgaagccccttgttgaaaaagaattaaggatctcaaggtggtgacaggggaacattaacccgagtgtggacccttctaagcatggggcctcctgttactgatcaggtcacctgttcatgaagccagccctggctactccctacaggtgagagatacaaattccttagcacgacatccagggctcttcagaaggggaccccagcccctcgtgaacacctcacagcttctataatgtttccctacttgagggcctttgcacgtgcccctctcagggtcaggggtgtgcatcctctctgttccatcatcacaccctccacacccacccagctcctccaaacccttaacccatcttgctccactccctagccccacactccttaggcagaatctggttccctagggtccccactaagcatttgtctcatggcacttaaaccagattttttataccttggtctcttcctataagaagatgagctccttgagttcagggaatattctctccttctgtgaccctggccttctctcacgcagtgtctgctgtctgggttcatgaatgagtgtagggctaaccgcctgcctcaatggcagtagattggaccattcacactcagacatgatcctggccagaacctcttgagtctatcggctgtcccaaccttgcctctgatgttgtgtggctccttacctcattcctcccccttttacttggttttaagctgcagggatgatagtgcctctcagatctcaactctaggcattcacatgcccattatcgagtgacttagtttgaattcctctaaaagcagacccaaagaaaaagatttgggccaagtattttatttggcgggtgatgccaggaagcactgtgagggagcagggaactgagaaagtagagggtggaaagctacaaagagacaccttgattagtaggttccattttaggcaaataggactcaggcctgctggggaccctctgaaaatttttggtgaacccagtccaagtgatcctaaccagaggtgaagaaactggggtatttatttgcaactgctgcctctcattggtaataggtcactctaggaacttgctggcacttccagtctgttctatacctgggtgtgtgtctgtggtcagaggatgccctcagccaggagatgcaagaggctatccacatggctgctggcagccactgagatagactgcagggaaatgggtgggccagtgatggcatctgctatgaagaggaatggcagttaaaaatccttggcaaaaatgttctgctcggatcatgaaacttagccagcgcatcaatgaccatactaatttcttagggttgctgtaacaaagtgccacaaattgagtcatttactgtctcacaattctggaggtcaggagtccaatatcaaggtattggactcctggatctgctctagatttctctctcagcttctgtagcctcaggcattcctgggcttataggtggctgttgtctctctgtatcttcacatcagctttcctccatgtgtgcctctgtgtccacatttttcccttgttataagaacaccagtcatgttggattagggtccaccctgatgaccttagtttaatatgattacctttgtaaaaaccctctttccaaatgaggtcacatttcttaggtactggaggtttgggtcttcaacatatctcttgggagggggatacaattcaacccattatgaccaaatgagagagattaccaccatgccccacacggtggccctaagtgggcgaacacctaacaaggaattgtgcaccttgtttaactaggtgttttagagcaggtcctccaaccaaccgccactgtaatttctcactttgctcacttacattaaagagaaaagtgggcccaactctttcagcaggaagacagactatcacccatgtcacacgcaggtaagtacatgagataaaagccattgtggctcacaaaaaccagtgggtaattctgtccaagtggaagattaattggaagctcttttaggctaagactgaatatcgtgggaggtatgtggcaagctaggagcaagtccacaggagagtctttgtcaaaactaaagtaattaaagccttcaaaaataggaccttgggaaaaaggaaaaaggaatttgataattttgcctgcagagaagcagactgaggtgtggttcacagttcccccgcatttgaaaggtggccagaggcactcccattcctgctgagaagagcgtgatgggaaaaaggcttaaactgaaggggagatttaggcggatgaactgaagaatgttcagagcctacaaggcatgggcactccaggattggttaactcaccataaacactttgcttttgcacaacacttaatgacttatgcagagtctctctacttgcttgtctcatttgattctcctgacactcctttgaaagggtagggtcagacacattgtacaaactgcaaagtgcagtgatttatgctcttagcctatacaatgcttcattttcgctagtccacggttcttaacgtcagcacaactgacatttggggctgcataattctcttgtcgggggctgtcctgtgcactgtaggatgtttaacagcatctctgcaatacaccaccccccagtagagaaacctcaaaatacatccagtcattgccaaatgccctcctgaaggaaaagtcacccctcgctgagaatcaccagtgagtctaaattcccccaactactgcttaagccctttaactatttttctatctcctggggagataaggaagtatcgctgttcaccatatacacttttgagacagatgaaaagacatagtcactgacttctgggagctcacagaccactgggaaatgggcctgccttctccccacaatggggaggtagccgtcatgtcatgtcttcaaagggcagaggtcacagaaagccttcagtctgcccagcatcgtcagaaagaaaaaatttctcagaaaggggagagttgaaactaaaatatgaaaagacaaatagggtttatctaatagatattgtcatttgtattatctcaagcttttaaacatagttttatatacacctggggtcatcagactatgagccaggggccaaatcaggcccactgtctgtttttataaataaagttttattggaacacagtaatattcatcatgtatttgtctgtggctgcattcctgctacaacagcagagttgaataattgtgacagagtctatatgacctgtgatgtcaaaatacttactatctgggccttagcagaaaaaaattgctgatccctgtctaggtcctggggtttgaagtacagggacctttactgaatgcttgtcctgtagacttgcatcacttttcattgctttaggtaagataatctactatgtaccaagctgtaaattaagtggtttgtatatgccacccaattcttctgttcaatgaccttgaaaaatatatactgttatcccaacaaatgcaaggtcaaagaaaataataagcttgtctaaatcatagaatgagtagacaggcagaggcagtatttaaactcccattttcttgacttcaatgtcattaaaacaccatgaacctcagtttcttcacctaccaaaagcaaacagttacctacctttcttcaatttacaagctttcttccaaattataagtgataggaatacttctaacaacaaaatgatgtgtaggtaacatttatccccattgtataattaagtcctaggtgagtcttctgctctgtattttatcacccctggctttgggaccagctgtgtcacatatgcaaatcatagcagactccttttacatgggtgacagctcacttcagtagaagcttccctccccatcacaaggctaagttggcaggaccagggaaacaaatacaactcaagcttggagttaaaagagtcgtgaaagcagagacatgcataaatctactttataaagggtttagaggtcctagaggccacattaaagacattccctaaatcagctcatgatggggcttcctgggtggtggtggagcttgacatgccccagagatctgacatttccttctctccaccccagctcaacctggtgggtgggagagctggtgggaactgtgcaggtggcttcaaacagtgggtaaggggatcttgcagcccttccttccttctcttcttccctgggtgttcaataaaaggcttcattggatgcacacatattactaggcatgtgtgtagaaaaatggcaagcattactattaattttggggacaattaatcaccagtacgaagcataatacacaaagcattttaaaatcatcatctcacttggtctctacaatgatcttttgtggtaggtgctggtatgcggaggctgaagcaactccatcttggaagctaatctaccatgttggcttctgattaacatcagttctgggaaggcttgtaagatttcctgtttgtctattatttcctaggtaagagcagatacttactgtaaatcctgcccctagattaaacaaccttggtgttatcgtacttccattgtcctatacatcccttcggaatccccctttccctatggtcctcaagcccttggtctggggagtaacagcatagggatcaaccatctcgtcttgccactgcccgaaatacagacatggcttctgttcctaagtccctattcaacttttctttctaagaaactggatttgtcagcctctttcttcacctctcagcttccttggactttgggggtaggtttgcgtagacatgctcaccacagacacaatatcagcttcattctacagatgaggaaggcaagccttggggagcttaaccaacttgtcgagactcatgtatataccaacactgaaaagcagatattccagactcccagtcatgccacaggcacacccctcagtgagaggtggggtttgtagttgaggctatttcctgcccagggagcagggaggcactctagcttccctgagctaacgtggttctgcttgtgtctgacttccaggtctctgccctttccaagctcactaggatgggcttcgggtgtgtcaaatgcctcagacagtacagatccacacagaatgggcatatgcaaccaatcagtgtcataaaaaagaaggaaatgactcgggccccctgtgtgttcaacatgtcgaaggtatctgtgcagcagaagaaagaggggcaaaagcccccagtgccacaggccagaggcagcagcttgggcccatgtgggagggtttgctttcccctgccaaagtgatgggctgctgcagcctggggcttgtgggaatccttcctgggcctgtgtgggaagtgtaggcagggagagtgctgctttcccaagctcatcccagctacagctacctttgtgctctgggattcaggacccccgagggggctggcaggagagtctctgttctcggatgggttgtcaccagggcatacatgggaagtgggctctctggagtcaccctccaggggacaatgccaattccagacacatttactggaacccctacactgatgaccttttgttgagggttgaattatgtccccaaaaaagatacattgaagtccaaacctctggtgtctataaatgtgattttatttgaaaatgaggtttctatggactaaattgtgtccctcccaaattcatattttgaagccctagcccccagtgtgactatacctagagacagagatctttaggaggtaattaaggttcaatgaggtcaggtgggtggggccctaaaccaacaggaaggactgtggccttactagaaaaggaagaaaaagcatttcctctcttctagtataaaaggacacagaaagaaggcagatatctacaagccacgaagagagacgtcactgagaactgaatttgtgtacattgatctggaacttccagcctccagaacttgagaaatacatttctgttgtttatttttttttcatgtaatcaattcatttatcatatatttattgagtgcctactatgtgccagaggatacagcagtaacaaaactaggcaaaaattgtgcctaaaagagggaagatgacttttcttaaagtgtggaataaagaaaagtaagatagcggatagaagcttgaagtgaaagcaggttcacaggaagtttctttggtcatttgttttgtttttaaatagtggaaagatgtatatgtttatggagaaagattgccttgaagatgcaagaggaagagatgatcaaaattcaagaagaagcagaaagtgatagaataaagagcacaagtggagaattagtgttaatgaaaagaaggatgcttcctttgatatgaagtgaaggaagagagaatgagtaaagaccaagacttgaagtccctagtttaatagagggagatttcttcttttgatagcaacaatggtattctgaattatttgaagacatgtcatatttctcttgtgccattttcctcccagtttaaacattctcataacctctattcctcacatgatgtttttccaggtcctttattctttggcactctcttctctggacacattgtattctgtcattggtcctaaaatttagatacccacaattgaacatactcctctagatatggtctagctaatgcaaaagaactgctgccttccaacttgttcagacatcatatgtttgttgtcaaacgctaagttgagttgttatcttttaagttttgtttttgttttttttttttttttttaattccaagaggtgcccacgttggctaagtaccaaacagggtactagggaattttacttctgagttaaatgccattctagttgttttttcttcatctccagtaaggttatctttattcaccagttgttacaatagctgtgggtcttgcttctcacagttttatgctgtctgtgctattttctctactgatcatcaccacaatcattattgcttatcataattgttatctttattttctcctttaatcaagaatcagtcttcctttatctcattattctcttttgcaggcttcaggataattatggttggagtgcactgggggaaccagtgcagctaagctctgacatctttgcatcccttttccatctgctgttttggcactctggtagaatagataacctaaaaacgactttaaaacatctagaaattttggataaaatataacaaacatccctttaaatgcacaactgatcttccatggaagtcacagaaatatataacgccaaaaagaagggaagctgaaacccagggctgtaaacatgaacatcatcttctctccctttttcttgtgacttatcttgtttttctcagctttggtgctaccaaggcttgactttaataggcatttccaatcaatgagagaatttcttttgctttcatcaacaattcagttattgatgttaacatatatatcatttgagtacttttcttttttttattattattatactttaagttttagggtccatgtgcacaatgtgcaggttagttacgtatgtatacatgtgccatgctggtgtgctgcacccattaactcatcatttagcattaggtatatctcctaatgctatcccttccccctctccccaccccacaacagtccccagagtgttccccttcctgtgtccatgtgttctcattgttcaatccccatctatgagtgagaacatgcggtgtttggttttttgtccttgcaatagtttactgagaatgatgatttctaatttcatccatgtccctaaagagcttctgcacagcaaaagaaactaccatcagagtgaacaggcaacctacaaaatgggagaaaattttcacaacctgctcatctgacaaagggctaatatccagaatctacaatgaactcaaacaaatttacaagaaaaaaacaaacaaccccatcaaaaagtgggcaaaggatatgaacagacacttctcaaaagaagacatttatgcagccaaaagacacatgaaaaaatgctcatcatcactggccatcagagaaatgcaaaccaaaaccacaatgagataccatctcacaccagttaaaatggcaatcattaaaaagtcaggaaacaacaggtgctggagaggatgtggagaaacaggaacacttttacactgttggtgggactgtaaactagttcaaccattgtggaagtcagtgtgctgattcctcagggatctagaactagaaataccatttgacccagccatcccattactgggtatatacccaaaggactataaatcatgctgctataaagacacatgcacacgtatgtttattgcggcactattcacaatagcaaagacttggaaccaacccaaatgtccaacaatgatagactggattaagaaaatgtggcacatatacaccacggaatactgtgcagccataaaaaatgatgagttcatgtcctttgtagggacacggatgaaattggaaatcatttctgttgtttaaaccacgaagtctatggtatctggttatgacaacctgagaatactaactcaagggtctttcgcagatgtcattaagttgttaaagtgaggtcattatggtgggtcctaatccaagagaagagatgcatggacagacgtgcacaacgggaggaccaagccaagacacacagggagaatggccatgggaagatggaggcagagatcaaagtgaggcacccacaagccaagaaatggcaggagctaccagcagctggaagatgcagagaagcattccttcttagaggtttcagagagagtatggtgctactgacaccttgattttgaacttctagtctccagaactatgagagaataaatttctgttggttaagccatcgagtttgtgtaagtttgttataagagccctaggaaataaacatatccatttattcaggaaagcctgctagagtgcaaatatttggaaaagatactactatgcaaatgtttgaaaaagatattgctcttgattctgccttatgggtttttcatttctgtaagctattctcaaagttttgttcttggactactattggtaattaagactgcaacatgtttggcaacatcagttgagaactgttgctctgggaacgttttcggcaagcctcagcccttcttttcccttggcttgcattgaggagttaggtgatactctgctgctcaggcccagcacctttatggaccgtattcccctggtggaatgaccatctctgcttgctctgattggctgttggggttttctagcatgccctatttaatatgtatgatttatctcttacttcagttggaaggtacagttgctctgtagttggcatgcagtcatggtgactatgaaaatataaaataatgttttggtttacagacacttagaaataagttgtgtctcaaaattgggtgactattctagttatctgctactcaatatccttgtgcgagccctctttacccagaatcaaactaaaccatgaggggcactatagaatgtcacccctgggtccaggatactatggggactcagaagccaagctcccactgggggatctagggcatgcccccaaggtaagattcccacctctttgttcagcaggaagcacccatcacacaaggaggtaggaataaacaagcattcgtcaagaacaaaagatacagatgttctgctggagcttggatacatagcataagagggaacagttctcacaggtaagagtaagttttcctctggtggtgacagtgggacctgtgggggagagaattgggagtactgacaggaaggcagagtggctgtccaaatgaacggattgtttgcacatggcctttagggcacgttgtgttagccttccattgctgcttatattagtctgttttcacactgcccataaatgcatacctgagactggataatttataaagaaaaagagccttaatgtactcatagttgcatgtggctggggaggcctcacaatcatggcagaaggtgaaaggcacatcttacatggaagcagacaagagagaattgaggaccaagtgaaaggggtttccccttataaaaccatcagatcacatgagactttttcaccaccatgagaacagtaaggggaaaactatgctcatgattcaattgtctcccactggattcctcccacaacacataggaattatgggagctaaaattcaagatgagatttgggtgaggacacagccaaaccctatcactgctgtaatcaattcccaccaacttagtggctcgaaacatcacagatttatgatcttatgacggtggaggtccccaaatggatcttctaggtctagaatcaaggtatcagcagaccacttcttttggaggctctggtggagaaaccatttcctcgccttttccagcttctagaggctgcccttctcattccttggttcacggccacactcatttccatctctgcttccactgtgacaacttctctgcctcagaccctcctgctttgcctttgtaaggacccttgtgatgagatcaggcccatccaggattatccctcatctcaagacctttaccttaatcacatttgcaaggtctcttccactgtgtcaggtaacattttcacaggttccagggattagggtgtggacatcttggggagctggaggatattatttcatctaccacacacatctctaccttgtacaggcaagcacttgcaaagtgcaatgtgatcctctggagccactgtcctcccagagcttatatatactctgaaagtcaactctcagaccacagcctcctgtccatgcaccactctcatcaacacccccacccgaaacactttcactccaccctctttgtcccctaactcatggagaagaaaatctaattagtaggagtggaatttggctttcatctttaccagtactagaaatatggtgtgtgtctttttgtaaaaattctctcaactaaattgtttttattaatttctgcaaaatgtgaacatcaactcccttcatgtgaatgtcaataagattaaatgagctgtctcagctcctagcctgtgcaagctaacagctcaggagatgtttatttctttccctcttctttccttaatgaagccctctcctttgacatcttcaattctggagcgcttcttttctgaggccttggctcccccacattgcccacccttttcctgctcgtccacatttctggcttctattctcttgtctttaccatctccctgaacaatgttatccgttccaatgacttcaacagtctctccgcttacatatgatgcctctcaaactctgatctccaactcttccaaagagctctggacctttgttccaattacctgaaaaacatcttcttggatgtcccattagcactgttaaatcaaacaagaatttccctccctcctgccttgctgtagttcccctagggattcggttgtgtgggaagatgtgtggagagctcttagttgactcccttctctgcagttctacctctctagagacttggaggacccactgtttccgcctcgctttttcaggcctagagattgctcgctcctgggctggctgcttcataattccttattagtagtttcccaagcttacatatctgtaaatatttactttagttaaattctccccaatttccacaatatgttggctgcacatgctttctactaggagtcacacaactatgataagaaccaagaaatattagtaaacgttttttaccattattggcctataccctggaatagccaacaataacctagaacctatgcaacaagaatatccaacaagaacctagagacctgtcagtctataggtgggaactacaggatgagattattttgtgtgtgagccaccattgtggaaaatgtgcctctacaggagcctgagattaccttgctttgtgttgtgttccttacttttttcaaagagttcctctatatctgctgatgaaactcttgaggcttgttttgaagcaagtcataggttattaatgccctaccccatttctcatgcttttgcccaggaacatttcaatggcaaatacataccttgggcccaagtttgcagcttctcagtcatctttcttctccactgagctaggagcactcactctacaacagatagttttttatttttatttttatgtatttattttttaacccttacaacttttctttggcagattcctgaagtagaaaatccaacaaaaaccctctgattacaatggaatgtaccagctcatgttggaaaaggtcactccattgcatgacatcctgtgacacatacagaaaatcagcttagtcagaagcatgtgtcatatgagtaacatttggacctgaattgagcattgtgcagtatagcttcagcaggtgctcctatcactctacagtaccccgtgtcaaatgggcaatgccagatgatgccaagaagccccagtgagtgagtgcagaaaaatctccagtgtctgcctgttacaagtggtctctgcacccagtacactgcagtgcccaagaatgagaccatgtccaaagccaaatgggggaacaccaattgaaaaacggaagctgtgaaggccaaacaggggaagcacagagtgttggccttaacttccctgaaatttgttcaagcagctttggacatcacaaaaagacaaatcaaccattggcccatggtggaggaaacactcagagaagggacaaacggagtcaagtgtgacaaggggcaagtgtgaggctcctatttgagattctatactcgaggtagtaatagatgatttgtctccaaattccaacagcagaatatatgtaaaccctgaattaatcttcatttggaaaacagcatttcgtgaataattaaaaataaaaggaataaatgttaccttcaagtgggtgggaattgactgagaaggagcatgagagaactacctggagttatgggcttgttctatatcctgccaaagattgaattgtacatatgcatgcatttgtcaaaagtttagaatgatacctgtaaaaacttttgcatttcacttcaggcagttttttttcctaaaaatatacacaaagaaacattgaactattgctaatgatatgcacatagaagtgtttacagatgacgtgtactcatgcctgcaacttgcttcaaaatacaacacaaataacatgggctgatggatggatagacagatggatagagaacagttagataataataaagcacatctaacaaactaattattgcagattctaggtggtgggtgtgggtattttctgtacaattctttttatttttatgtttgaaatttttcatttaaaaatgttggaaaaaaaactaaaagaaactgataagagaaaccctagggcttctcatagagttgaaaatatttcaacataaatgccattaatctgaaaaattatcaaaatacttcttttagaaatgcagtccatgacacaagtaatccaattaccctcaaactaaacctggtcataaaaactggtccctagggagatcaacaggtatttacataggaaaaaacatgaaggttgcaagattataagaagtgcatgatgctgaagaggacatttctaaaaaaacattttagggctgaagactgattcagtccttacccctagcatatccacctgctgttcccccacctctaaaccactaacttcactgaagtcaagagatgtgactcatttatgggctatgggcaactgctgggaatcctgccatatggttgaagaaaatcacagactcatacttgcagctgcttaataacatggttaaaatcggagccctttagctcttatcttttgtgtaaaatgtacagtttgaaagatccacatctttttctataatttaatattgtattatttttcttccagctttattgatgtatacttggccaaaaaagtaggtatttaaggtatacagtgtgatgttttaatctacataacattgtgaaatgattatcataatcaagctaattaacatatcacctttaattacctttgcgtgtgtgtatagtgagaacacttaagatctactctctcagcaaattttgagtattcaataaattattattaacaatggtcaccaagctgtacattagatcatccacaacttattcatcctataactgaaagtccacatactttgaccaacattaccccaaggttcatatcttgactgtctttttggagtgagtgtcaacaagatgactctatttttatgtcaatgtctgacttacataatagaaggctatgcagtgagtaccttgtgcaaaggagatgattaggaaacactggttcgtgaaagaatgaatgcatggatgggggcaagatttatcagagatgctttggaagagagggaagggatgtgattcattcaaacagaaagaagatttgacatggatcaaaataatgtaaagaaaaacactaaagaaaattattaacccggaaggagctggagaaagatgcaatgtattgtgaaggctttggaataatacagtttttctgtagcctgggtgtatgacctttggacaaacgctaaacctctctgagcctcagtttcctcatctgttcaaaataacaataattatagcgcttatttttagagtcattgtgagaaatattaaataagatgtaaagttcccggtggaggctacaggagacccaaaacaaaaaagggaaggtgaataaaaaaaggtttcatctgctggcctagcctgttgggctggcttacagttgaaaaggagaaaaataccacaattcctgttgagatggaaagtcgccattgttgggtcctgagaagacaatggaagaggtcgatgaagtgggagaatcacagaactggccacagtgcttaggtatttcttgagaataatcccactaggagatatatttaaggaggataaatacattcctggcggaggtggagttggaaaaaaatgtgagtggacagtaatcaccatgggacagatggaacactaaggaccccaagggcttcaggattaaatgctgtttctaattaagccaccatttgcacgacaccagcactgatcattaaaaaaaattttaaattttcatcattattaactgcatctcatatctgtaattctgatgaaaggataaaatagaagagatgatggttatggatatatttcattgctaggtcaaagaagagcatttcaagaaaaacaagagcggaactaactcatacatttgatgacgtatagggagaccaggcaatcaggctcgaattctagtgaaaattgcacagaaccctcaagaatagtgtttcccactgctttctactccagttgagtctgaagagttgttcctcaaacaggacaaatttagattattttagtaacttattccatgaacaaagatgaaatcttttaatggcagtagaaggcagtgctgcaaacagaaataactccttaaagaaatggaaaacaagtattttattgcactcacagtatatacaaaacaacatgtaatgtacaacaaaattcctccttaacatcttcttaggactaaatggagaaaaatactgccagtggaaaatcttactaagaaaaaaatcaatcaaattcttaagaaagcccgcattcattatctgagcctagatttctcaagtatcaaagatgacagtttttgttaattagaaataatttaaaagcagttttccactaagatttttgcatattaactaaagttacatggtagaaatattatagaatatactgatgttttctttgataaagcaaaaagaaggaaaagttggtttatctttcccaacatataaaagccctttgacgttgtgcttgaggctgaaagaggctcaaatagtttactgcaatatttctgtaagtcacaggctacatttttttttcaatagtacggggacatttttgtcattggccaaagactgttttgagagatggagaaactttatttgtctaccaaaccttgtaaaaaaaagtctgctttcttcaccccacctctgtgttccatctgggggacctacctccaatatttgctggaaatttcatcttgcttgtcagcctttcagatctgtggaaaatttcgttccttttttttttcagattattattattattattatactttaagttctgggatacgtgtgcagaacatgcaggtttgttacattggtatacatgtgccatggttgtttgctgcactcatcaacctgtcatctactttaggtatttctcctaatgctatccctcccctagccccccagtcctcgacaggccccagtgtatgacgctcccctccctgtgtccacgtgttctcattgttcaattcccacttgtgagtgagaacatgcggtgttttgttttctgttcttgtgttagtttgctgagaatgatggtttccagctttatccatgtccctgcaaaggacatgaactcatcttttttttatggctgcatagtattctatggtgtatatgcgccacattttttttcccagtctatcattgatgggcatttgcgttggttgcaagtctttgctattgtgaacagtgctgccataaacatacatgtgcatgtgtctttatagcagaatgatttataatcctttgggtatatacccagtaatgggactgctgggtcaaatggtatttctggtttagatccttgaggaatagccacactgtcttccacaagggttgaactaatttacactcccaccaacaagtgttaaagtgttcctatttctctacatcctctccagcatctgttgtttcctgactttttaatgattgccattctaattggtgtgagatggtatctcattgtggttttgatttgcatttctctaatgcccagtgatgatgagcttttttttatatgttttctggccacataaatttcttcttttgagaactgtctgttcatacccttctcccgctttctgatggggttgtttttttcttgtaaatttgtttaagttccctgtagtttctggatattagccctttgtcagatgagtggattgcaaaaattttctcccattctgtaggttgcctgttcactctgatgatagtttcttttgctgggcagaagctctttcgtttaattagatcccatttgtcaattttggcttttgttgccattgttaatggagttttagtcatgaagcttttgcccatgcctatgtcctgaatgacattgcctaggttttcttctagggtttttatggttttaggtcttacatttaagcctttaatccatcttgagttaatttttgtataaggtgtaaggaaggagaccagtttcaattttttgcatatggctagccagttttcccagcatcatttattaaatagggaatccttttcccattgcttgtttttgtcaggttagtcaaagatcagatgtttgtagatgtgtggggttatttctgaggtctctgctctgttccattggtctctatatctgttttggtaccagtaccatgctcttttggttactgtagccttgtagtgtagtttgaagtcaggtagcatgatgcctccagctttgttctttttgcttaggatcgtcttggctatatgggctcttttttggttccatatgaaatttaaagtagtttttttctaaatctgtgaagaaattcaatggtagcttgatgaggatagcattaaatctataaattactttgggcagtatggccattttcacgatattcattcttcctatccatgagcatggaatgttttttcatttgtttgtgtcctctcttatgtccttgagcagtggtttgtggttccccttgaagaggtccgtcacaccccttgtaagttgtattcctatgtattttattcgttttgtagcaattgtgaatgtgagttcactcatgatttggctctctgtttgtctattattggtgtataggaatgcttgtgatttttgcacattgagatattgctgaagttgcttatcagcttaaagagatttggggctgagactatggggttttctaaatatacaatcacgtcatctgcagagacaatttgccttcctctcttcctatttgaataccctctatttccttctcttacctgattgccctggccagaaattccaatactatgttgaataggagtggtgagagagggcatccttatcttgtgccagtttctaggggaatgcttccagcttttgcccattcggtatgatattggctgtgggtctgtcatacatagctcttgttattttgagatactttccatcagtacctagtttgttgagagtttctggcatgaaggggtgttgaattttatcaaaggccttttctgcatctactgagataatcatgtgttttttgtcattggttctgtttatatgatggattacgtttattgatttgtgtatgttgaacccgcattgcatcccagggatgaagccaacttgatcatggtggataagctttttgacgtgctgctggattcggtttgccagtattttattgaggatttttgcatcgatgttcatcagggatattggcctgaaattttttgttgttgtgtctctgccgggttttggaatcaggatgatcctggcctcataaaatgagttagggaggagtccctctttttctattgtttggaatagtttcagaaggaatggtaccagctcctctttgtacctctggtagaattcggctgtgaatctgtctggtcctgggctttgttttgttggtaggctattacttactgccaaaaatttctatatattttttaatcaaagtgttaaaaggaaatacttgtcatgtaagcctaaaggaaaattcatactttttcgactcataaaaacacagatataagcaggtaagaacattcggacatggatgaaacacttcccagtatgatttacagcctgttatttaccttttcttaattgacttcgtgcctttaaatcacaaatctcaaagatctcccttctctaaattttgtatttagaaatggggacgggtgatgctccttatctgagtaacctggatttactagaaagtcccacaggagtagatctttcctgttggttattgcaagaatcagactttgcagggttatgttatagtaatatattataaatacccccaaatctgagaggcttataaaaatgaagtttcgttttccactcatctcatgtgttgtacattacctcctccatgccggcatctgaattaaaggagcaaccttttgctgagagtgttagccaggagttgccgtcaatgtgaacttagacccatcctgcctttgtgactgcaggccaatgcttaggggcaagacagccattttgaagccaccaaaggctctaaggatgctagaaggtgcagaattgtgcacacttcacatgtggctaccagcaccagaatgggtgaatggcagggccatgtaaatgcgagtgtagaatacaccaggaattaacctcctccctcagtcttttcatgctccagctaccggtgaaagccacatatagaacttctaaatctgatgcattgtaatgcacatatcatcaattagatatcccacttagagtcaggaaactggataggtcattctggccaggatgacagtgttgtctacttggaatcacacaacctgtaaataaccaggaagttcaaagaaatcagactaattttctgggaagtatgacaacaactaacatttaatgaacacttcccatgtgcaaagtgctttgtatgcattatctcctttgatcctcacatcagccggatgaggtggcttttataatgctcattttttacaggtgagggaaccaaggcttaggaagattaagtaacttgataaagatcacacacttaataagtggtagagtctagatttcatccaaggcagtctgatttcagaaattcctacttttaaccattgtgtagtccaatcctaactgatgtttgtaatcttgaacctgggatattgtaagagtcagaagtgcctttggaatcacaaacattatgctccacgtggcctttatgttagattcattttgttaaaccctaactcagggatcaacacattttttctataaaggaccaaatagtgaatcttttaaattttgtggctaaaagcagctctgttgcatattctttgttatttttacaatgctttttttctttttgagatggagtcttactctgttgcccaggctggagtgcactggcgtgccctcaactcactgcaacctccacttcccaggttcaagtgattctcctgccttagcctcttgagtagctgggattacaggcaccactaccactcccagctaatttttatatttgagaagagacagggtttcaccatgttggccaggctggtctcaaactcctgacctcagttaatctgcctgcctcagcctcccaaagtgctggaattacaggcgtgagccgctgcgccaggccctacaatgctttaataaaggaaaaactatgcttatcccatgataccatataaaaaaaaagatatgggccagatttgttccccaagtcaccatttgccaacctttggtaattcatcaaagcttgatgcactgggtatgacatatgtgtaacctctctgccaattatgtgattaatcagaatatgccatttacaactattctgacacagtggtgatttactaaaactagaaggtgagtttgggttcgtctctctataacttcataaattggtgatcttgagtaacctcaatgtggagtcagagtcacatgaggacatctcaaatgtctccttgcagcaaggcagtgacctattcagcccctgttgtactcctgaaggtggcatcaagtgacactttgtagtatgcatgtcattgctcttgacgatttcaattaaaaatgccagtgagttttactgaaattgaaagactatttacaagcctcctctttctcaaaagacatcaaaaccacagcaaagagtgttggatccaagataatttacagagtaataaaggcccacagaggatgccttgagtttttgacgtcgtgttgttggaagtcggatcaggaagggtgaagatccacattactaagccagcgtgtctatagaactgtgtaccaggcacagtgctaagctttacacatattaatagttaatacaaccacttcagaaaggaggtaacagttttacccccacttttcagatgggaaagccaaggcagagaaagctagaggactcatttgagtttccccagtgagtaaatgataggtggaagactgggaccccggtagatcggcttgagtccacgaccatggccactatgctgcactgtgcttccatggccagaaaatggctaggcctatggaggaaaataaccactgtgtgaagaacaatatttaatttctgaatgaagtacattaaattaaaagattgatgttattcaaggcaactaggggatactgggttctaattctgcttttaccaatcagctaattggtcactatggccaattagtcaaatggagtgttgcgtttgtcagttttcatgtaaaagagaagtgttagtatttaacataatcttttgtgttagtatgttaaatgtttttaaatcattttgagacccccttttccaaggagtcagtcatatgcatgcagcctgccacactctgagtaccaaggcccatggcctcagggaaaactctaagcccgggtatttagtttcattcattcattcttcaggagagcaatatcttctcatctgcataatcaaagggtcagactgcatatctctaaggtgtcttccagtaattatattttttttgtttgatgactacaaaaggatttactcattgagggaagtctttacttgctgaaaaatgtctttactcactaacgaaactttgattaaataaagctctaaagatatctattgactgtagctctttgcagcataaagtattttttcattgactacaagataaaatgtccttaatattagatcagcattaataacaatctagcataataataaccatgtaaccctactttgcaaaagactcagccctttagaagggaaaatgaataaacttaactcattcttcttcgagggccgagataaaaatctcaagctatcctagcattaggagatatacctaatgtaaatgatgagttaatgggtgcagcacaccaacatggcacgtgtatacatacgtaacaaacctgcacgttgtgcacatgtaccctagaacttaaagtataataaaaaaagaaaaaaaaagagaaaaaaagaaatatttttaaaactgtaaactgttaaaaaaaaaaagaagatgtgaactataaaacacacacacacacacacacacacacacaaacaaaaaaaaatctcaagttatcctttagatagtccaatctgctttaaactttggcccgagttattttcacgaacatcctctgtttccaatggagtagataccatataagacagaacactacaaatcactttgtgtaaactcaccaaagaaagggtggggggggggagaaaaatcagcacagagtctgctcttaattaaaaccagctgatgatgtacagcgatttgtctggagcaccctggctgcgctggttccctgacagctgaacattctttcctgcctgtactgtttgaactatgtccaatggtgaaatcgttaaacctttgataactgtagtttaaatgcgagaagggagcgggggagctttctgttttaagcaagaaagagagatgagtgttgtattacacaaattaacagttaaaaagttagtacttattagatcattttcactggcttttggtagaatgcctctggacattttcagattacctattgacactttttcacggcacaaatgtcaaaaatctcacttcctctcttcttccctaggggattcttgctgtagttagaagggaaatagtatgaaccacctggtcttactcaaagaagccttggggataggttaatttcacagttgaaagctccatgtgggggatacatttacatatttactaatacagaaagggctaccaaaagaaaaaaatcatgtgacttcaggagaactgctcacaaacacacaaaacactctgtttcatccttgagtttgacagatgcttgatagggaacaaagaataaccaagctgttcatctccaaataccaaagtaactttaaaatgaattgctgttcacagtttctggaagacaaatcggcattacgaggatgtaaataataacctgtctgtgtgttcatacacaccctaaacgtttaaaagatatttttaggtataaaatatttcaaaaacacaataccctttctaaaacagccatcatgatatatctgtattataggaaagtgcagatatatacagatagtacgtagttatattcatagaaacatagatgacagatgggtagataggtagatagattaatacttagtgtttcaaattatacttggagcaatttttttttttttgagacagagtctcattccatcacccaggctgaagtgcagtggcacgatctcagctcgttgcaactcgtgcctcagcctcccaagtagctgtaattataggtgcgagtcacagcacactgcccaaatttcctttttaaactttggtttcagcatagccctgtctactacttggaggtgattttggtgtttggatatgttaatacatttttgccaaccatggtagccatggggtctggcacaatgctgtaaccccattctttcaatagaacgaatgccccttaggctgtaagtgtggcccctgtttcctttgaagggcttttagaaatagacagagtgtcttttccctgggactctggactcctggggcaaagctttttaagacaggtgtgaaaattatcctggttgattcagaaatgagtcattgtctcctggctgctgctactgatctcaagctagcaaaggtcaaatgaagttctggttcacataaagacattctatgctgagttttaagcatcactggggagtcttccaattcatttgatttgggagagctcaacaacattgctgatgtagttatctttgtccagttaaacttttgccagacaaccatgggacttctggcccacaggaaggtaagggaagatagaaattagattaaaagacacccaagtccaaacacaatttcaccagacaggtaaatatcttaatgccaattagttttgacaaatatgagacatatttggctttgttctatctaggggtactttttcatttaatcaatctctcaattaaaattctttagcattgcttatttagagtcaaataaataaatatatctgtctgggtataattcatttaaattagagcacaatgtttgctctatttgccttacatattgtcattcaggaaacataagtactcatgaaattttgatttctattagttaaactgtataagcatgaaggagttagtagggtggtaagccatgtgggttgtctacactcaacgcttttctacctccacacatctccttgctcagaaagctcccctccaccagcgtcccaaaatatcagagagtagatgtatcagcccccatgcagctgggctatgagtattggctgtggactgggacctgaaggcaggcatctcgagcactttggaaaaggttttcttctctaattacaaagccctgcctggaaggacgtgtctcccttctccggccagctgttgctgtgcctacaagtgacctccgtaacaattaattctatcttgtgacctgaggattctgtgcagaacaagagacacagcacagatttttgatgacatcaacaagccatcaaattgaccctctactcacttacctctgagcttcaatttcttcatccttaaaatggaaagaataaaagcatttgctttaggttttttgatttttgggggatgtgagaattaaataaaataatgcaaataaatccacttgatattatgccaaggacataagacatgcttgtttttagcttctatcattatttttattaccacttacaactacatgatactatgttttcagagaaattgaaatagttcctaaaagccttcatatgttcaacaaagatcataatgtaagcaggagtaaaatatctgtcagtcagtacatttcttacataatcaatgcttttccagaataatgtttttaaaaaacattttgaggagtaattctgagagagacacctggatagcttatgaaactgtttagttctctcacataggatctgccaaattgctgacttctgcaaaaaacattaagaatttaaaattatgaatatggaataatagtttttaaatgatagacaaatatttccatattttatcagctcctggattatactgcagtttcacacctgcactattttaataggctaccttgtggcccaatggttttaatatgtattcaaccctaaataatcactcattaatcttatatgacaaccagatagtaatatttattaatgtgctattgtcaatagcagactttatgctacttatagtatctgcatttttccccatagtaaagtttcctacaccctaaacagctcatctcaaaacaatgacaaccagatattcttaacttcatgaaaaattttatgaaatacatgtttgtaccaaaaagcagttttaaatcctctcttgaaaataattggcagaaaattacttaatggaatatcataatttattttataaatataaataaatgtgagcttgcctagatcactttggcttaaatacaaatatatccattgtttttaaaaagtgtctgttgtaattattaaacctgctaaggagagggcaagatacctgtagactgttaacacatctgatgatgaagccaatgataaggattttaggggtaaaatacgacttcagtttggttgagtggtttgttttctctttgagcattatacctcctccctgaagccccttcagatcatttttctaggtcttaggcacctgaggtgggattaagtactctcttcacttcccatacaggcttccaaatcattatcctctatgccctctaaatatcattgctccactgaggttaattctctacatatcatcttttccacttgtttcaattgtctgctgtcttccaagccaatcctatacatttatcaaaaaatctagcctctgagacaaagttttctctccacccaaattccactgatccaccataatctccagtgactttggagttcagatggatgacccctctaatgtcttcctttgtccatcttaacttccacatctccagtggccttcatctctgctccatttcaggtacttcctcttaaggttaaatcctggaatttttccatccttgaattctcaaatacaaatgttccactttctgataaaaaattttcattcattgggttttactgttactcctaaaactatgtggtttttagatttaccaggtcccttggtacctaatgttctttcagaatcagcctctcctggcctcttttcctcccctggatcccatcattaaaataacgaggaccctcaatttccttgccctccatcattctgtaacaccccctcaacaaaactacaaaattggatcaatgtttcaagccacattcttagttcctataacaaagtggttggatactgttagaaaaaatatattatttgatatatcagataggttcccaatatctcccataaatttatttacttcctattcagggactcattttccaatacccttcaatgtctatgaaaaagctccatcagtcttctcaagaactctatctcatacaagctcattaattttggcagacaaacttgccactttaataaaatattaaagtaaacagacagtgtcttccccaactttgttgcaagtgttatctattttaatatatgtataaatcctgaacatctgtaattcccatttcagtccataaggcatctcttttttttgttgaagtctccaagttatgcctttgcatctctttccttctcctcaagtctttttcattcatcatccctactctgtcccatatcttcaatctctccaatattccaatctcagctagaacctgcacttcggactactaatacatccaggttttcccaatttaaacattccttcctgcattgaactttccaggtggttagttttggtgaactaaccaccaacttgttctacatattcccatctgtattagtccattttcacactgctataaagaaatacctgagattgggtaatttctaaaggaaagaggtttaattgactcacagttccgcatggctggggaggcctcaggaaacttacaatcatagcggaaggcaaagaggaaggaaggcacatcttacatggcagcaggagagagagagagacagagacagagagagagagagtgtgtgtgcgaaaggtgacataccacttttcaaccatcagacctcatgagaactcactgactaccgtgagaacagcatggggaaaattgcccccatgatccaatcacctcatgctagctccttcaattgatacctggggataagaattcaagataggatttgggtggggatgcagagtcaaaccatatcaccatcttacctacaggtcttcaaaacagcaatatatatttcctatatgcactttacttttttctcatttcttccttggtcctttgcaatctgactttcatcatagtacccaattataatagttttctcagtaggaaatcaataatatttttactgaagattctaataaaaagttcattttttaatttccatgtctcttggtgtcctagcctcttttgaaaagagactggacagacacgccccaagccagatggaagtcccggtatggcaaactaaagagcttggacttttccagccaaattttgaagagatcttgaaagtttattctcatgaagctttttaccttttttgcttctgtgattttgcgctctcatggctctcctttcacccttcctagctctttctcagacacattttctcctgctcatcagtgaaatgtttttgctcagaagtctatcctcagcttgctatcttctcaccccacctggttatttcctgggtgatgctgtccacgcccatgctttccaatgcctggtatagggcatagattccaatgtggacaactttcatgctggcctccaccacagcacgcttcagatgcacatatccagctgtttattgcacaccatacaacccacaggtatttcatactttctctgtactacacagaactcaaaatctttcctacaaatttctgtcttcctatctgttccctatcaattcactcatataatttagagaaatggaacttgcaggcatcattgtgcctttgcccttaaccagtcacactacaacttctttttactttattccaagttatttcttgatttttcctatctccacctcctctccacctctcatgcatttctactctggcttctgcaggcccctagtcatttcttgccttgattaagtgcaagagcctctaatcattctttccaccatcaacagtgttctcctgaaagccattccctggagtcaccagaattatctggtaccaaatcaaaccaaaacatggcacgtcccttgaatgaacccttcagtggctgctatcacctccaaagcaaagcccaagtgccttagcaagaactttggtcacctccccaggaaatactctcactcctcctgactcatgcatgctgtcaatatggaactcctaaagttctcaaggatgccctgcctggaaggcttccaaacccactttgtcacagttctccttgaagggtctgtgattcagctcagggactatctctttctgattcctcttatgacaccttaggctagcctaagccctctcccttctatatgaataaaaccttatacctgcacctattatttcatttactttataatgcatgcatttttgtgtaatatacatatatatatgtatatgcacatatatgtatttatgtatatctatatacctctatctaatctatcatctatctctctagtcattgcacttgctttacaatgattcacatgagtttgtctaaccctactcatctacggacaacttaaatccagtaatgaacttgttcagtcacctatgaatctccagtgactactgtggtacatggactaaacaaagtctgtattctatcaatacttttggaaggaaattatgaagaaatacagttccatctctcccacaaacagatcagaatgtacggaataataactggcttgcataatttggatatctgtcccctctaagcctcatgttgaaatttgatccctgttgttagatgtggggtctagtaggaggtgtttgggttatggaggtgggtccctcatgaatggcttggtgctgtccttgcagtagtgagtgagtgttcactctatttgttccctcaagagttcaccccctagccggttgttaaaagaccttggcacctccctcccctctctcttgcttcttctctcaccatgtgacttgcacaagcctgctcctcttcaccttccccagtgagtggaagattcctgaagctcttatcagaagtagatgttggtgtcatgcttcttgtacagcctgcagaactgtaaaacaaataaacctcttttccttataaattatgcagcctccgtaagtattcgaggagagctttctatgtgctcagcgctcttccagctgctagagatacagcagaaaacaagatacgagaagtccaacttagcagagatcacattccagggtgccaagtatcctgacaacataaaagtcagcacataaatgaacaaaaggacttctgacagggctaagtcattcaattaattttagaaatatttattgaactcctgtgtaagggtcagatactcttctgggtccagagcgtagagaaagtaacaaaacaaatatcccttccaacatggaacatacagatgaaattcaaaaggggctggacaatggtagagagtgacttggtataggagctacattcaatagtacggccagctagggcttctttaggagacactgtttgtgttcaagtttgaatgataaaatcagcaaagcacagagctgggattgagagggtggaatattccaagatagggaaagatgatgagcttggtgtacactgtacagtaaatatagcagtcctgagactgctagcctgatgaacacctacttgcaaggttggtccctggttcacatctgaaaattgggatttcagtaatgtttccaccactagagagtggcttaattaattgataagctttaactaattgataaagttggtttaccatacctgaagtgtttataaacacaatgggacttatgctgaacacctgcttttcttggagagtctggaatgttggtgtgtgttaggggaagagtgcctatgtgataagccccaaataaaaactctggatactgaatctctaacaagcttccctggtagacaacatgtgtcacaattcaatgctaaaggaattaagcatgtcctgtacgactgcgctgggagagaggactcatagaagctggtttcttgtttcctctggacttgaactcatgtgccttttcactttgatcatctcctttggtatcttttcattataatacactgtagctgtgaatatgaccatatgctgagtcctgtaagtctttctagtgagtcattgaatctgagaatggctgtggggatccctaacacatcgtgcatacttacttcgtgtaattcatgtcatatatttgaagaaaggggttagtatgaacaaaagagttgggtttagtgctaaagacagacaaaaacaagggatgtgttttgcaggaaagaccagcttaagagaatcaacaccaataaggctgcatggtaataaaacctttggcaggtttcattcaactgctttgactcttttttggtccttttatggttttctcatcataccattctttctaagtaactccaagactttaggcatttaagttattcctggatattggcctaagcctttatcttcttaaaatggttcttccacgtttacaaccattacaattcaccaaacataaattaactgtctttgagactcctcaagattacattactccatcattcaatgaatagttattgagtacagatattttattgcaaccctaagtactaaggtagccattgctgattcaaagatgactaagacaaatccatctctattctcaaggaacttgctcaagggaagaaaagtgccaaagaaaaacaggcaaaagggctttgttcggatggcagttttgcaattgcatataagttttcagggccttctggccatccaaagccacatgtcctatgccacagccatgctcccaacaggtgaacatagaaaactgtaggtgagtcagcatatggaaaatgcaggggattcctgaaatagtactgagtcattaatcactgatatcctggctcagttcacgaagcaactgggagtaaataagcaaagaaagtgaactaatgcttagaagatggaaatacccctggggacatttgttgagtcagtataagaacgtggaaaacttcaacagtcatagattcaaatggaatgaaataagaggagaagaacattccccaacagcttgatctctcatcaaaaattgctggcaagcaccactcttctgaattctctactttgggaattggaggaaggaagaaaagaaaggaataaaatgttgttctgatctcagcggattctaaatttatgtgatgtgacaacacatagtacacaaacacatagctagtgtttgatgtgtgatgttgaattgacttatacaaggcaaattataatacaaaggaaaaataacatagaagaaaacaacctggagaaactgatgggagggaagataggctttggaaggggtaaattaattaactcaaaataagatagtttaaaaaaacaaacaaactacaaatggggattcatatgtacgggttgtttcaaaatattgagtcttgccaaagttgccttgagagaaaagtgaaagtgacactagatattgatatgtttggtttagtggtacttcccactaaatttggagcttctcaaatattataaagtgaatttctgatagccagttgcttcactgatttccattgcaaaatcaaggatgtgtttttttctttttttaggaaacaaagatttcacttacatgtaaaagatatatttaagaacatagtaaacttctaaaagcacagcttaaagaaaaagaaccacccacaacaaaacacttttttcaaaatatcaacagtcatagaacacacacacacacacacacacacacacacacacatatgtatcatacaaatgttgaattggtttacagttgtttgtacatttcagctaaagacctaaatgtagaaaattgaccaagtcatttcatgaaactcagtgaccttcatgttcagcatggtactttcccattttttctactttcttcacttaagaacttattcctacatatctcttttagcacatgtacacatttcagcatccctgatgtgaagagagagggtcgaacaccccaaggactgtgaaactaacaatcattgactgcatcctcctattcagtattgtgctaagcactagacggtctgatgacatttaattcataaatgcagtgcacaatgggtgttcttattctcatgttacagtaaaggctgaaatgtccatactctcttttgctccaaacaacaggctctgagaaggctcatccaccgataatgccacatgcaaggctcgtcccatcagcatttgccagtccagtccagggcgggctgccaggcctgccattgtctagggctattggatctcagtgtttgggaggacgcttcatccagccacaccaaatgcatgactttgagggacaccacccctcttcaaaaactggaagcaactcagcaacctaaccagcaatttcacacaaaccaggtcagggagatgatagcttgtccatgggtttacttatgaaagctgctcagcaaatttattgtagctgggtagtaatgcaggtttggtgactcttcaatgccacatctgcccctaaaggagttccaggaattctgatggaaattcactgagttttacttctgtgcacattctgtcacccaggctggagtgcagtgatgaaatcaaagcttactgtagcctcaacttccgaggttcaagcaatcatcctggctcaaccttctgagtagttgggactataggtgcatgccactatgccaaaataattttttaatttttttgcagatatggggtctcactgtgttgcccagattggagtgcagtgccacgatcatagctcactgcagcactgacctccagggctcaagcaatccttttgcctcagcttctgagtagctgggactacagctgtgcaccaccatgccttctaacatttttaatattttttgtagaggtggggtctaattatgttgcccagattcatctcaaacttctgggtttaagcgatcctcctgcctcagcctccccaagggctgggattacagatttgaaccaccatacccagccctttacaggttctttagcttctcctgtggatgccagtccacagggacagaatgcagtactcaaagctgagaagacaagttttgcgcttgcacaggattccccgttaaagcaaataacaataatgtgaagtgaaatgctgtctttcaaaaagttatttgctcttcacagatttttttttcagtgaatccttcccatttcttttacataagacatttcccaagtctcatcacctttcttaggccacaggtaattcagaaagctatagatttaataattaataggattctaccagaccatttctttccttacattttcaatcaatcagtcattagctattgagcatctatgatatctttcaccctccttggaataaaagcattattttttaaaagttttcttggcttcactgacgcatgttcctatcctttctccatgaataacacttgtttgctcaagccagacacctgagggaatcctacctgcccactctccctatgtcccctccaatctgccatccagttctgccagctgttcccagttctctcactctctgggtctggccctcatgcagctagctcaaatcattgaaaggactccatgacggtccaccgtgaacaatgcctctagaacaggaaaatatgatcacatcttcccttgcttaggatttttcaagtttcttctgaccaaagaatgagctcacctttcttgcctgccggaggaggctatgcagtcatttattcagttcaacctgtttttattgagcacttactgtgtgccaggcattgatttaggtgctaaggaaatagcagtgaacagaatccctgttctggtagagcttccattctactgagaggagacagataataaacaaaataactcatgcatgtgtgtgtgtttgtatgacatgcacacacatgtatatgtacatttgtatacatacatgtatatttatacttatttttagaaggtgacttgtgtacaaggtgacaaagaaaaacaaagcagggcaggattctagggaatgctggaggaggggttcattttacatagggtagtcagggaagaaatcagtaagaaagtgacattctgacaaagatgtgagttagtccctgcttgtttgtgcaacatctttttttaccgcctctctgccttgcatattctgtttcacaatattgaactcttagctgtctcaaacctaccagtccttcagcctccaggcctctgcacgcatggttgattggccccaggttgcctgttctctgcaaaggtggactcttagttgtcttttttgtctctgcccctcttctcttcctgggattctctaggcaggctcaagaccctccctctgggctttgactttgcctggaacaaacctgctagagtgactatcaactcatatcatagttcttctctttccctctctaaatacctatatgcagacatagacatgtccatatgtaacatataacacatgttattcactgagtttttactggggtaagtatatttttaaaatacatgtgtatatgttctgtattctccattactttttgaaacaacctaataaggtagaattatccccatttcacaagtgagaaaattcacttacccaatccctttccactaatggggctgggcttgagctgaaagttatctgacaccacagccttggtctgcccacaatgcccatagctttctccccagagcctaagctcccttagagtacattctatagctttgagtttttgtgtcttgcacctagcacagtgttcagtacagagtaattgctccctaaatatttattgaacaaatacattttaatactattcattcattcattattaatgatgtgcaaaatttctatgtctagcttcctaagtgtgtctccataggcccaatctttcaatagcaataatagcaatattttcatagcacttaccatgtaccaggtactgttataagtacaaatatcaacttttttgatcctcacaacccaatgaggtaggtaccacttttttctccattttacagagggaaaaaccaaggcttcaagtagttagttcaatttttgaagctcacacagctagcaagtgacagaactggggtttgaactcaggtgtcttggctccagagagcctctgttccccaagactgcatgacactgccttcctcaacccttcagactcaggttccaggcccagtgaatgatgttcagtgatgactatgaactgttttctaccactaaaaagagacataatcaagaacatctactttgtattgcttagtagagaaaagcaacctcttaaatccagtactcttagtgactaagctaatattcagaggaaatttggcaacctccttctaacatactgaaggcaaagggtaataaaaacataaaaggaaaagtatccaaaaagaaagtagataactaggtgtttgagaaaaacaaaaataaagaagtttttgttgttgttgtttgttttttttagatcaagaaaatattgggaaactgctactgaaagaggattgatgttggcataaagggagagatcttctgtatctcaaaggaaatttgccttttaatccaaagtcaagaaagcccataaacttaccctagaatcaagaaggaatcaactaaattatatcagaattcttagatccgaagaaggtcattttcagtaagtggatacttgcaggcttaaatgaaatgtgaaaaattttgaaggaaaatgtgatcaggaagtcaaagtaagcttttgacactgcctgccactccccactccccacagacaccctcccctcgaaaagaaaaggaataattttttccactgcttcatgaaggggacaaagtcctttgcgacttctttgccttagaatactattaatcttttgttgttgtgttcctttagaatactattaatcttataaaactgtgcctctgaccacagggtggattccagcattaaactaccaatgctttacagagaatcgtgagaaacactcagggaagaggtaattctactcaagggtcatcctttttccttgccaattttttttttctttatcagcatttgaaagaaaaccagatattttctttcctgaaagttgatgacttcaggtggggaacaagcatctgtggcagatggactcttgaaacgcagtgaaatatcctgtcttcctataaatgtttatgggagcaggagaactgaagaagaaaaacacagcaaaatgttgcatgactcacagtccgaactgcttctaaataaagcatttctcagagtttcccatgaggtgatttgagtgatcaggcagcagggtccctgtgagtggagcaagcacatttttaaaatacaaaaaggtatatccaacagtcactcaggagaatcgttctgttgttttcgatgtttaagaaaatgtatgtctaagatgagagtatcagatcatgtatatcatgtcctgttccatatgtggccagagcgtcccagcagttcttggctcggccactttgcagatgatgatcagcaggacgtttcatattgactcacagactttcctctaatagagcatctccaagtgatgataattaagtttaattttagatcgtgtgtgctggacctgggaatgtttttaaagtggtagcaagctccattgactttggcagttgagttttgaaaggaaggtcttatgtcttagactacctccatactgttcagtccctttatactccagaaaattatgaatttggaatcaactggggagaaatccttcgtcagactactgtgcaaacggtagacactcctgcccttgactgtcagcctcgcagatggaaacgtggccacccttcttcatattcaaggctctctgactagaaagtcagaaagtggctacagcccttccagccaagctagaggagtggaaaagtaaagtctagagggcttgagcttgtcaggaaccacggttagaacaattcctagattctctatgcagcttaccagtgacggtcttctatgacctcataacagattggcaaaattacattaggtgactcaaccatttctgggtactggtattgagtagcggtataaagacgaaatgattgtatcagggaataattactacctagaacgtgttcaactctctatatgtgcagcagacatgtggtcaaatgagctgacttgttctgggtcatcagatttaaaaactacaggatacccacttaaatataaattttagataaacatgaatacatttttagcatacatgtactccatgtaatattttatcattcattgtttacctgaacattaaacaaaattagttgcttctccgaaatttcaatttaactggacatctgtattttaaatggcaagcttctaagatgcacgagcttttctgagctactattttatcaaaacacattctgaatgttttcctgcaagaactggggaatctagagaaaatgcatcaaaaataatttaacattagcaagaaaacggccactttggaagggcttgtctcagtcactgacacatactgtaaacctgtacccccggaaaaccagcaggagagaaaagtaaaagcaacatgatggttgagtggatcctattgtgacctaacacttccacccagacagaatccgagttccctgcccgtaattttgagcttcaggttccagtttcctctttttctttactaggtttcgctgcctcctgtagggggaaataagggaaaagagataacgaaagaaagaaagaaaaaaaaaagggccggcaatttcatgtacatttgttttggcattcgctgaattctagagatgaaaacaatctcctgcttttaattcagtccacgtgcaacaaagttgtacgttgggagatctggcttttaataagaacgattaacaagcgtttttgatcacaggaagttgagaagagtcgctgcttctaagaatacaataaacattgactagcagttagacggtccatctttctctatcagccgtttagcagcctctactttgatttggggcaaatgcgagatgggaccaggagagagctccccacacccccaccaccacgtgggcagtggttctgttccagagcgccttccttcctgtccagggaggcaggctgctgaggccgtttctgggcaagaggccattgtcgggatatttgctttagatagcttgcagctgggctgagtgggtgtttcattcagactcaacacaggcagctcccaccgtctctactgtttcaggctagtggaagctaggggccttttgatttataaagagctctctgtgcctccagttacattttaggaagcaaagccgtgataaatgaagctctggctgctgatctcctggatacacacacacacacacacacacacacacacacacacacacacacacggcctacacaccttttcccctgtagcacagaggctttcaccaccaggagatttaaccctggcctagggtagccacgtgggcatccgtgttcatccgacatcctcttacatcagagcttgccctgaatagggcaaaatcaaagtgtggagcttgttggttttttatgtggtatagatattcttatatttatcacatttccaatttgaggtcatcgaccaccatggaaggaactgtgctggcatttctgggcaaagcctaaagttgattcttcttttcctacagacaattgttttcatgtgtgctgggaatgaatgcattctgaggatgaggggtggggaattctacacgcagggaactcaggagtcttattttctttattttcttatcctgagctacaaatgactgcttaattgggagagactacaattacaagagttcactgagggaagcatgaaaacaaagtgaaccagaaaaatagaaacccagacttctcagttcctgtttatcctatttttaatctccacatctcagttgctctctttcttgcttcttttgccttgctggaattcatacacacacctggctttccatttgccttggggacagtgaggaggtggagcccaagagtgggagggccctgctgcctgccggtggggagagctggtgtccgctggaagaggcagacctacagaaagctcggccgtgtctaactcaaaggtgttggcagcacatgaatgatgacttctcctctcttaactgcctgggctaggagactttcgcatgtccggacaagtgggaagaaggaaggtcggggtggaggtgaccatgagattgtggacgaatgttcagactgaccaaggcctgaagaggtctgaacgcctgtgttcttcagccctcctccccctcctctctctgtgtctctgactctcttctctcccctcccctccctctgtctccttccttccttcctttctttccttccttcctccctcctcctccttccttccttccctctttccctttctccctccctccttccttccttccttcccctcccttcctccttccctcccttccttccttctgtccttctttccttccttccttccacacatgtttaggaaatgcctgccaccagcagtctccacattaggttccaactataccaaaggaatctgtgccttccaaaaccttcccagggacagaaaccactcacaagggatgcctctgccatttcaccatgcgggtgcccacaccaccacaacacacttcaatttgtgaaaacactttttcttccctatcagagtgaaatagtgcatacccttgtgtggctctgcaactgaaagagacaaaagggaatcacaccgggaaaatcacacattctggaataaagagggaaatgtagaaactgggatcttaaagcctcgggggagaggaccctggggcccgggctctctgggcagcacccaggcctggggaggagctgtttccagtcggtctccctgcagaccctgagtgctgaggggagggttggcctgtctccttggcccctgtgtgcccagcaccagcatttgtgctgggaacctcccaggcaccactctgtgttaaggacgtgccaggagagacctgggaggagacgaccccggggctgggtaggtgtccagctccttcctggttatcttccacccagcacagaggacatcctgtaactcagttgctcctcacagggtcacatttagcctcccacgggctctgccactcacagtgctcctgtcaggaagcggggtttgttccctgagatcgccagtccgggagtctctccaggacccctgcgggtgtccgggtgtggctttggctgccctgttccctgagcctggtgtatcatcatgtgagaactgttactagtttccatctcagggaaaggataaccatgcccctaacaccctggcaggaccagatctacctttctgtctaatatgaccccttcatctgagagctggaactttctggaaccttctagagccttgtacaggctctggagcctactgcggacgcagaactagtaatagatttgctcagttcctgcagctttagctgtggggcactcagaaattgctgtgctatgtgggcttaaataatttgaatagacatgaatatatttaataaaaacaatctgctttatcgaattatttccatttttgttctcatttatttcctttagccccagataatgttaaaataaactactgatgtataattaactttagatgttatagtatcttgagccaagctgatttcgacgacagtgaagaacattttgaagtagttttatgatttttcacagcacaacagatttttataagaagaaaaaaaagctttaaaaatgctggcagtgttgtttagctcctccaacacaagcacccaccacagtaaagcccacaaattcacagtgggctgaaaagtggtttctggaactcttttaaaccttggctaactttcgggggctcccaaaggacaagattacttcatgtcaaagcaaaaattctcctgactctgtaaacagcccacggttctgggaaatatgaaaaacgtagatcaaaaatgaagttgtgttgtgtttggagaggctttccgtgatcacgaaccctccgtcccgtgggatccacactactcccgggtttttgaggtcctcctcgtcctcggggtcactgtatccctctttaccttcttcctcagaacacccattgccaaatagaaaacaccaatgatgatactactaccagcccagaaggctgattaaatctgcatacccttctttggagcttaaaccgtgctgtgcattttcacggtaaatagttttgtgttttgtggcatatatacaaacttggcaagtaaagacaaaagtcaccaaagacctcatttcccactagttttgtaacaaaaagccaaattgatattctcttttctccttcctaccgcacaaacgatactcccttcatcttatagcataggtaagtgtcaacacccctctcaccaagaatattttgtggctcagcaaaaatcaagtgaacttaaaatatattctgatcccaccaggtaagaagaaaatgtttaacataacacagtattccaccagaataagctgagctggggtttttttccccgtcgtagaattcatgttgggaaggtgggtgtgagtgatgattcactcacaaagtgaggcatgtgataaagaaaagattgtatcctagaattttaaaccttatctaataaattatccagacaaaggggctcagggctttttggcaggatcctgtacttccattagaagcccaaaaagctcaaagaaaagaaactacagtgtattccattcgttcctttggcaactcggatcttcccttgttttaaaccaaacaaacattcgcaaggaaaaccagctgcttttacaatgaataaacccattacctcaactcctttactcaataccattacagaggtatttttacttgtcagattttctgtttcagagaagcttggatattttcagtatgctgtcaatacagacaaaacagagctggttttagcaacagcaccagatgtgtctgaggacatgggccttcctggacctccaattccaaggttgggtggtaagttacagctgctgtcaaaaatagtaacaacaggatttggcatcttgacacaatgctgcctggtaatggctaagctcacggcacagtagccagtggagaggaggctgcatgcacatggaagggagaattaggagaccctggagcgtagactcaacctgtgcgtccagagccagccctgttgtaatctccaccacagcaaagaaaaccagtgcatgttgcttcaagtacccactcatgtttgacccatagcagtcggtaacattaattgtgctgagggaggcaaatgaacactaaccaatctaaaacaagagcaaaagggattttaccaaagtatcagcattggagaaccttccccttcccaaatccagtttacccctcttttctggataattgggtatcatggatgctcagtgtgtcagagggccagcgtgctcctggaatcaattggagacttctgtgacccacaggtcagacaagtcaggtctatagggtctaacaagagagtttactcagtagagtaaagggagcaatctccactcaaaaatgaacaagtggggtttacagaagttagactgtcacagaaccagagttagaagcagttgcagagccaggacatcttaaatgatcagcagtagaagtgaaggttaaagttttaaaaattatctatacacctagccacgtatgattgctttctgcagccctgatcccattcaatctaggctccgtgtggtctaggctatgaaatgagtacagcattggactgtttctcggttgatcttagctcaaactcttgttaactgaatgaccccctgagcaggtttttaaaatgccttgaccttcacatttctcttttatagagtagggacaatctgtcccttagagtttgttaatgcatgtagtacacttagtgatgtaatatacttaccacaatgtcaaacatatagtcgacactcaatagataataggtatggttattataaagcagtcaaaatgagccttgtattcaatagttccctgtaagaaaagcatgaagtctaacatggcttataggtcttacctctcaccagctttatctagcaacattttcgcctctgaaatcaacactccagagatgttgtaaattgttcagtgccttgaaattcagcatttcttctaactcccaggccttggaacctgtgctgccttgccttggagcatgctatcaacacctcccactcatccttcacctatcagcttaagtgccttcctccacttcaatgctaagctgtgtctccctgccccattctctctagagtgcctatgctgttatactcacttgcccagtagtggccttctccatgtgactccatgaaaccaggagccatgttttgttcatgttgctattcctaaaccttagcagagttcttatcccacagtaggtattccactaatacttattcagtggataaataaattacaaaactatttagggaactcaaaattactgataattctcaatctaggtggctcaattcagaagggaatagaattcaataagatagaaatagaaagtgaatatacgattcagaaatgaataggatataatctggtctgctctaaaagaatggcttttgcagaaaaaaatggctagctgacccctaacagctgttcccttctcctttcatagtaatagaagtcttaatttttagctgtgtccatagtcacaaacaaacaaacaaacaaacaaacaaacaaaaaactacacttcctaacatcgttgcaggtgtgaccagattttggagaagttctgaccaatgaaatgcaggctgaatgctgcctctcttcaatccattctcttcaaaatccaggctataagtacctagtcaaagccataagcccccaccacttactaaatatgtgatgtgtagtagactggcacactatgttgaatgacagctagaatgcactctttttatatccttttcttctctctctctttgatgcctacagtaaatatgtaaaggctggagcgttgactgccaaactggatgttgaggaacggggttatatgttagtgctggcgaagggcagagctggatgaagcctggatccctgagtattttggaaaatataaccaccataccagccccttgctgcttaccctctgacttttcatttgctttaccaactattatttttatcctctgttacttgtagttcagtttcaaagaaacctcttaattaccaggaattgcattgtgaaaacaatgatgtatgtttgaaaaaaggacttaagagagtttcaaagttatttttatttcaagattttcacagtagtattttaatagcaataatgtattttattgatgttagctaaagattttttaatctcaaacataaatgaggaaattataaatatcatgaaagaccagacaaaaatcaatagcgttctagattctaatcacacagaatatttttcaacagtcactggtgagcagaagaaaataatatcaacggagcagccagtctctccagaaagcaactgtgttttccaaggcagagaacacaacgacctttcttcttgtgtttatggtggtatttctcaaccacaagcccatgataactgggaacgatgttcaaaatatttatcaatctgcacaatctggatgccatccaatcagaacagatgctggctatagaacaactagtatatccatcctggctcatggcaacatgatttcagcctagggataccaatagtagcatgtgtacggaaatcacgtttcttaaattatcaaccacattttgtctaatttatggcataacacctgatagaaatgcctgtatcatatgcaaaattagaggttcatagaagtagttcttgttttttgtgtgtgagtttcctaatgagttggtttagaaaagaatgagacccaaaggatcctgctggagagatttttggaaggtggatgactggctgtttagcatgtatttttcttaaccatcgtttgtgtttgagtgcttgtatgcatacatgtgtgtatatacatgtacaaacaaaacatacaaaagtagtgtgactgcaactaggagtacattgacactgtgcctgtggccagcaatactgtctcctttcattccaggaacaagaaacttcagagcccccaacatactagacttgcttctggcattcatgccacagggctcctggtgtctcaaatactatttttgatgtgcagctgttgagttgaaacatctgatagtttctcttctccagactgatttggtgcaagataccagtaaatgatcatttgtttcagttcttacaagagtcaaaagactaatattagataatggttcctcccacacatggccctttccctctgactttttgcctggaggatcccagaccctgagaaaccacgcaaagtcattctcagacaggcttgggctttagccaccagatctgtggggctccatctggcttataaagtctgtccaaatgggagaataggagcacccggtgtcactctcccacacccctgtcagtccatgctaagtccttgctacagttgtactcatttccttttgttttcttccctgtggatttggagattaattggccatgattcactcagacagtcatttgtgtacttgaaggccattagtaaaatcccctctcggttcagaagaaaagagggtgatcaaaatatttaacaactgctaagactgaagaactgtaaaggcaccagcattattgtccagtcagaatggactctggccgtagagactgagcaggttcttggaggctctttgtttagagacttggaggatgagggaagcaaccatttgccagttggtctgggacatatttccttctcttaatcatggacagatctgtcccagtgtgtttctgtggagaatccccagcctcagccttactccttatagtatattatcaaccttgcgaatgtgataattcacgattagaacacttttcaagactaataaccagattgccagtgtagccctatttgccacagccagatgactttcagccatatctggagaatgatgtaagacaattttttttttaatctctcaaatttttaacatgtacttatgagacagtatagtaacacaatgactatccatgatttaggataaactgaacgtgatcgaagtgagtagtgtgatatggtttgctaaaaagaccccgatataatcatagcttgttctaacagaagcgtgatgtcttgtgctactcaatggtcagttgacatctaccctatgggctcttgttctggccaccatacttgtggaggaagtggtgcagtagagcaggtgaatggtcccagtgatgcaccagagtgtgtgcccatggacaggtgaatggtcccagaaacatatcatatgagaacaggttgaaggttttttcactatgcatgtcataaaaggtgcctgcattttgcatagggccttatttgaagaggaaataggcttattctgtgttgtcccaaagggacaaaataggaccagtgagtggaaggtaaagagaggtagaactggggtcaacataagaaagtgtctatggaaggagaatgaactattatagtaatgtaagttcaaggtgagtgcaattcagtgtaagaaacaccatgaggcatctattgtgccctggttaccgtgtgaggtgttgttaacagaaagaagaatgtggtggcttcactctactatgaaatacagatgtgagaagaattcataagaaacatcacatgttcccgaagggatgcttttataagattccaaagacaggtagggaggaagtgattagttcaagaaagtgtttataaaagagtgagtgacagatctaggttttgaagaataaattcctgtttgatgaagacagacagacaagggatggacgagtcttccaggttgaggaatcaacatgtggacagtccagagaggtccttcaagcagtcttggaattggttatttcatttgggagcgcaggcttctagtcttctgggatagtctacatccataacaggagctagaatttcaatgtcctcattatttttgaagtatttgcttgcatgtcagtatttgtttggttttcctcattcaatgaatctgttcctccagtgagtctgtaagggaattatttagcaaaaggttttccaagtttaagaataggaaaatgtttaaatatgagtatatttaaattgttttttgtttcaatggatttttttttcaagttggtctcttttactttgcatagggaagaccttttactttgattagctttggtgactttgctgcaactttaaaaatatatccagcatcctaatccttggaggttcagattcttggaagataaactgcaactttgcaaatggctaatggtctggtgaaaaagaaggatggtaaatttatggtagtactagttttatttaaaatatatatatatatatatatataaaacctaaagaattcaacactcaactgggtatatcaaatctttaagattccctaaaatcaagtttaaaattatttttattgtatatccaagctttgggtttcctggtcaccttttcgttgagctataaccagagaatgaagatgagtaggacctcagaagcagagagaagcagacaagtgggtcaggccaggtagcagtgtcaggggcaaaactctacttccaccaacctcggcatgtaggaatgttgtggcagtttgtagaccagcccttcttctacctaccatgaacccaccaatcaccatagccagtaaggagggtcacctttgtgtctcctaaaatgtttgtcaccactggatttgaaaggcacacttgacagtcttgtgtcaagtaaaaactattaaacacttccaaatcataagctgatggcttccaaagagcaaataaatgtcctaaagtgatcactatttttaatacccagcttgacagaaatgtctgttgagcttactgccaggtgccacattatcacttaaccaaaaatgtctatataaaaataacttccccccattggaatggtggcctgtatacagagaaatctatttatgtttcagttcagtttcaaacatctttgaaaaacaagctgaatggatagaactgaagcaatgtgcgcacctctggaaagatgcggcagatgttacctcttgaattggtggaaataaaaatgacattcctctcatttaggttgtttggtgttatgctgactttttaatataatctgaagcagaagtgacttaatgtcaacgacactatttcatggttataaaacttttggtttgagaagttgttagcctatttttctgctttctggatgtggatggcccttagaacaatctccccttagaagggatgcattgagtgtggagaagtgccagccactggaacgggcacgatgcataggttgattcctttaagttccaaggcagcttgaggcaactacccagagcagctgaattacagggtcctgcaggtccatgtctctcttctaggtgtttacttcctcagccttggtaatgctcagtccctggttcccagtgtcctctaaacttgccctacagtggcactcatcctgtatttcgattacacctttctcttggggggccaggactgggtcatggccttaggcagccacagagaggtcagcctggactagggtgaaagcaaaaggattctcagaaatgggacttgagctcaccagcaagaatgtatagaatttcaagccaggacaatagtgtgaaaaggctaggattaaggggtgggggacaaatgatggtgccttttcctcaagaaaaaaggcatagaattgaaggaggtaattatttcctcctaatgtgtctcatttttctgctaggcttctaatatcacacacagaaagttggaacatttgaagtttcctttctcccaaaataaaaagctgattttattcatcgtaataaatctatttacagctcattcataggtattggtcacttaattgaaaacactagtatgcattaaatattgttatatagccaaataatttttaattgtctcagctaccaacttgaaaaatatttcattttctataatctgagttaatttaaattgcttttgtgcttcgattgatacaagtttaactttttttctcattaagaaacattttactgaagtcaccttttgaagaatgtttccttttctgaggtactaaatctgttggcacttgacactacagttagtagcaaacttttttttttttagatggatttttgctcttgtcacccaggctggagtgcaatggtgaaatctcggctcactgcaacctccgcctcccaggttcaagccatttacctgcctcagcgtcccgagtagctaggattacaggcgtgcaccaccacgccctgctaatttttatattttttagtagagatggagttccgccatctttcccaggctagtcttgaactcctgacctcaggtgatccacttgccttggcgtcccaaagcgctggaattacaggggtgagccaccatgcctggccagtagcaaattttgagagaaggaaattaaataaaagtgcattcattttcttttaagcaaaatctctaatgagctagtgtaggctacatgaaaagctgcttcttggcattcaaaatgtttagagaccaatgtccttacaccatggatgtgcagtcaaatgaaagcttcctagtattcaagtaagtgcctgcagttctaagccaagctcttgcacttactgctggaagaaaggcggatagaagaggctaatgttacaagctgttcttctcaaggctattaacctgtctccaccttcttccttggacacagagccttttgatgcaaagctgcaaggagctgtgcattcttaaataaacattttccagttcaaagagccagtcctatgcttcaatttaaagtgagattgaaagagttatttgctttcttgtccctttagcatagacaagcacagcaagagccctcatgggttcccttgttcaacagtaacttctttccaaagatgaattagccaggcatagagtttgactttctcaaagccactaatgtaaggtaatccttggaatgagacaggatgactccaccgactcaggaggagtaaaatattgtccttcttaagtgagcacattgaaatggcctacctatgaacacagagccctctaatagcaaatacagtaatgcatcagtaagcattatgggtctgcaagatagcagtgacttacacaataatagccctgcacactagagtgtccagagcaaacaatgccctgaggcacaagtgcaggtgggatgaggtatgccagggcagtaacctacttacctgggccaatgatggcaactgagagaaagaatgtgaggtcttctttcagagtcactgaaacctgtgactcaaactctctgacataccagaggagggtgcgaggtgctaaaacaggtcacaaggcttgaagtagctgatgcaaactgactcagggaagagaaatgtgttcaaaaacagcatggggtagattggaatgtcccagccctaatctaagagacatgtgtctttgtagggatgacagactctgcctcaacacattttgaattatccagagcactgatatttgcagacacactttggttctgtaataatgaataaaggcaaattggtcattcaagaggtatttgttgaatatctttcattttatagcattgttcagggacttgtgaacgccacaaacatgtgcaaggacatagtctcttctctcatgttacttaaaaggtctactctctattttcaaagataatcagtggatagatacatagatagatattggtaagaatattttcaaaaaattgcctagaattctagaacttgcctaaggtctcttggcatcaattgtcatagtcctctgcttttcaaggagacgctagacaaatttctatgtaccatagaaaaacttttctgtgggtagggaagagccatcaatcaagaactaaatgtataaaatagcaaaatagggttttgaatgctagcttcacccctgtgttattgtgggcaggtttcttaaccactagaggctcaggttgtgaggtttttatcctcagaataatatttttataatttccttctaagggttgggtgagggttccatttacgaatgactgacccattgtagacactctgtcaatgctagttcttttctttattcttacattttaacccactggattcacatacaatgagtttacttaaatcggagatctgacagtgccaactgtgaaattctgtgcaagatggttagacttctctggcaatatggtaccaaaggaatcctaaagccatcccccttcaaagtatacaaaaatactggataaaatgttgaatgctttctaagagcacggcttaaggaaatggtcagaaacaaagaagctgagcaggagcacaaatccagataggtgactggtaaatctggcagcagcctaaagctgtctggctactgttgtaaactagagctttggatttattttattggtgaaccgacaggttaggtgacttcacataaaactagggtcttcgaagatcagcacccttagggaaaggatgaaccaaaatatattttcccacaaatacaaatgtccagaaagtgtatccagtacaggtatcagttttgattctgggaaaaggggaaagaagtattctttgagaatttgttaccctccttcacacaggtttgtagtccaattcacagtatgcattgtggtctgaaaaacatcaagccaagatttcacattctggtgccagattggtggtggttcctggtaactggcagaagtaaatgcaaatcttctcaagagtaaggctccttcaattcaggtttcaaagaaaggccaaaaattcatgaattaaagaaaaatcatagaatacataagtgaacaaagtaccacgagtgagagtctgcagaaacaacacccagcagatcaaaaccagagcataacagatactgaaattattagataaacatatacaataaatgtatttaataggtttttaaaaagaagatgaaagggttgacttgaaaacatgagaaaggaaaaagagagtgtaaaaatgatgagtcagatttgaaaaagcaatatatttatcctctaggaataaatctataatatatacaatttgaaattcagtgcagatattaaagacagattagacgcaactggaagggaaatcatgaaatgcaagctaaccttatgaaatgatcctgaatgcagtacagagtgacaaaagaggaaacaataaaaggaaggttgaaaatgtacatacagtgaaaaggtataacacacattcagtcagacttgtggaaagtgatcattggaaagacacaataaagagaatagggaaagcaaaaatacggaagaggtgatggtggagaattctcttgagttgatgaaacctacgaatcctcagatttgggaacttcaatgaatcacaatgaatctagaaatctaccctagatttttcaaaacagctgaccaccaaagataaacatgaccatctgaaaagtagccagagagaaaagctatatagcctaaaaggagccacagttcagcaggcaattgatgccttcacaggggcagcaggagctaaaatgcagtgcaatcaagccatacaaaagaatgaaatcatgccctttgcaggggcatggattaagctggaagccatcatcctcagcaaactaacacaggaacagaaaaccaaacactgcatgttctcactcattaagtgggagttgaacaatgagaagacatggacacagggaggggaacaacacacactggggcctgttgggaggcagggtgggggcaaggggagggagagcattaggacaaatacctaatgcatgaggggcctaaagtctagatgacgggttgataggggcagcaaaccactatggcacatgtatacctatgtaacaaacctgcactttctgcacatgtatcccagaacttaaagtaaaataataaaaaaaaatgcagtacaatcacatcttcagagggctgagagaaagttgccatcaaactgcaaactgactcaaggaagagaaatgtgttcaaaaacagcatggggtagattggaatgtcccagctctaatctaagagacatgtgtttctgtagggatgacagactctgcctcaacacattttgaattatccagaacactgatatttgcagatacattttggttctgtaataatgaataaaggcaaattgttcattcaagaggtatttgttgaataactttcattttatagcattgtggaaatgtctttcagcaaaataaacatattttcacacaagcaacagcaagagaatctattaccagcaggtcctcactaatagaacttctttaggatgtatgttcaaaggaaaggaagatggccccagaatccagatacagataaaggattgatgagcaaagaaaacacgtggatctcacaaatataatgtgaagcaaaaatggcactgacagattattcgttcatcagagaaccacgtataaaaagttcaaatactcaaacatatcttgactgggggcacatacataggaggaaacctataaggaaaaccaggcaataaatacacgaatttcagatcatgttcacctgttgaaggagaaagcagagagtgtcactgcatttttatgttcttctggagcatactcatagatctaccatggaccaagaaccactgtgcctgtatgactggctataggacaagaacaattgcaatgaggtgcttgtcttcaaggagcttactacagtctagtgggagaggaaagccatgactctatagctcaggacatgctgatagcataaatgcacacaaatccacccatactttactttgatatccctttctggttgaccctcaacctgagtgccagactcccttcaatacccaaacataccatatgtatcagatgaatgaatgaatgagtagaggagtgcttattttatattctgtatatcttgcatataaatcataggcacacatattgtttggtgtatttgaaacatttaatagcataaaatatttaaataatctttcagaatccaccttgagagttgcggataataatatattttgaacagaaatttcaaaatgtgcctcagtctaatatgtatttgtccctgcaaaaagctgggaaggtaagaatggaagtggaaaaggataaaacatgtcaatttagagaagacttttccctatctggcatcccttgaaatcaacagttagataatagataaactacatggggaaattttgtaccatttgagggtgtaatctgccacattatttcatgagaaagtttggtcatgtggtctttggtcatgtggtcttttttttttctttccttctttgcagtgacctacaggaagctcaaagctgtgtgttcagctgctctggctttcttcatggtggggcttagcattgattccctctcctgatggctccctatggcactccaaggctgagacatatttgaggctggtatgtttgggtatggaagggagtctggcactcgggtggagggtaagcctgaaagggatattaaagtaaaggatgggtacagttatctgtatttaggctatcagcatgtcctgagctttactgccatggcttttccctcccactggactgtaagctccttgaagacaagggcctcattgcaattgttcttcatcctgtagctggtcatgcaggcacagtggtgcatggtgtgtggtagatctataaatacatatcaaatgaatgaatgacataccatggacagctctcttcctatcctattgctagagcacatgggctcgcaggcaggtgagtgaacacaaacatgtgtgcaccccacacacacacacacgtacaaactcacacatccatcatttacatgcagaagttacattatactttcatgccaccatctgagaattccaaagagaatatcaggtgaaatacgttaaattacttttgcacatgctacaggtcatgagagtatgagttcatgagaaaggagacactgaaactgaattagcaacagagagcagaggttgtgctgaagggaaagcaatgttaatgccaggaaggagtctggtgttgtacgtgggaaatttgggataaactgcatggattttacagccttccagggaggcagagtgctggagtaggttcagaaagcatttctgaaaacctctttcttctagtcaccctgcctaatttcctctgactctgtcctcccctggctgcatttcctgtttctggttagaactctgacctaagtttctttatttcggaactaagcagaattacttgtttcagtgaatacatttgtggaccacagcaatggggagaaaggagcctgagaaaagtgttcctccggcccttgaggtcaaagacctgtaggaagtggtatggcaatgaccttcagtgacagcaagcccgtgatgtgacttcagcaaagtgggatgggccattttcactcactgagcttgtcagatgaccttttcttgattcaccattacctggagagtttatccaactgctgggacacaggagatgtgaagaaatgggtatactggtttgaaggataaatttgccttctagctgaacagaaatctgagagctgctgaatcacctgcaaaattatatcttgttctgtagtttgtttcctaagtttcctgggatttgattagtcaggaaaagaccacaccactagcaggggaagtccaggaacaagggagccaatgagttctgtgtcctacttaaatgaaccttgaaggtatccaggagaatccttccttctagctatggaaagatgggagatggggcaaagtgatgcccagtcatggccaagaaagatctgatgtttctacaaacagctctccctttcttgcatatctacctaaactggagacccttttatcttctgccagcctgcttcaaggcttttttttttttttttttttttttggtggaaataagttaggtgggtgggaaaggaagaaatgcaaagttgtgtctgcctgtgattaatcttctccagaacacacctgggtcttagaatcacagaggctttggatcggagggggctgagccgagcaaattgttcgggagtgggtagaaggataagaggtcaggtgggtagatggagagggcctcatggagggacttccccataaatgcagctcctgcatccacagtcctttcaaatgtgctgtgcttcactaagatcaaatgcatgggaactgggcagttttccaacttgtccttaattgtactcttgctagcatggctttattagtgggttctaagtgttgtgaatgccaagaaaatcggacatcatagaataaaggctatattttacaaccaaatattaagcatacctttcatgtattactgtttcccagtggactgcaacatttttacatctattattacatttatcctcactacctccgtatgaattatgcagggacttatgctcatttttcacataactaaactgcaaatcagagaggttaagtaatttgctccaggtcacacagctactaagtgaaagaatcaggacaagtattcagatcttctttttacactagcagtttggttctgtccatccactactgatggagatttaactatgatacggttacaagaaaacaaataatttcctcattgacaatttttcctgaagggctctcttcccaatacaattcccttctcaatacagttgaccagtatttaaatgagtcaatatccccgaaagttgaaaatatcagaaattctggattgttaaaaaaaaaatacgtcttctggataattctcgggaaatgctgtagaaagagatctgtttttgtcatactctctgggacagtcggttcaagtctctgctttctttagggccagtccatccattagagaagcaaatcaagttctagagagggtggtacattgtccaaacttatgaaagactctactcaaaggtggacatggaactgtgacccagaaaccgtgagtcctgtcaccccttcttgcgaatgtgatgtaggctgggtccttttggaagccaaatgcttccaagaactcgttggctttatttattaaagaagttctgggctgggcacagtggctcacgcctgtaatcccagcactttaggaaactaagggcgggggggggggcggatcacaaggtgagaagttcaagaccagcctgaccaacatggcaaaaccctgtctctactaaaaatacaaaaatcagccaggcatggtggtgtgcacctataatctcagctactcaggaggctgaggcaggagaatcacttgaacccgggaggtggaggttgcagtgaactgggattgagccactgcactccagcctgggagacagagcgagactctgtctctaaaaaaaaaaaaaaaaaaaaaaaaaaaagaaagaaaaaaaaggaaagttctggcctggggctcaggtgtgatgttttcacaaaagaaatacataatctacaagcccaggaagtcacattcgccctcctttatgtaccctccatgaaaatgagagcttgtctgattggaccagctcattgccatttaggggagtctgaaagacgagcacacctgggtggtgatggctatggaagtttatgcttctaaaattaaggatcagtaagtaaacgccctttaaatgcagtctatctgtgcgatggttctgaagtattataaaattctgatgcctcatttcatgtcagtcttgggaaaatgttctctcgtatattattgtttggtgtgcaaacaattaaatatattggaaggcaaaattaagcaatttccataaaaccttaaatatgcctatcttttgagccaggaattccttctttaagaatttataagcacagagaggtccactcaaggatgcttattttagtagcgtttataacagtcaacaattaatattcaagtaacaacttgtatgtcaatcagtgggcaatgggatggataaattgctgtccagttacgtagtagaatattttttggttaataaagaaaaagagatagaacttctagtactactatgaagttgtctctaccatacgtaaggcagaaagagcaaattacaggataacttgtatgttatatttttattttgtggaaaagagaaaaacgtgcatacacctttaagacttcacgtgcatggataatggactagaaggagatatatgaagttttgaacacttgtcagctctttggggagagaatgggaagaggacatgtttgtcttttttcctcttatacgcagtctagtatttttcagttgttttgtattgcgcaagtactactttcatcacttgaaatatcaatacatatttaaggaagaaatagccaacatgtatgttgggcttgctgtatgcgacgcagaatgctaaatatcttacatgcatgatctcacaggttactcacagtggctctgaggggcaggtggtagtatcagcccatcttacaaaagagaaaagtaagaatcagaaagactaaataacttgccccaggttacacagctagtgaaggcagaatggtctccggagaagaggactcatgcacttaacccctggctctgctgctcttcaaggcggtggcctgcacccagccatctatgaggggccattaaagattctgagtgtggggccagcagatgggatttgctccagtgaggaggggctggagctctttctaagtgacatggtattacactatgctgagtggattttgtccccagctgctgctctgggggtgattctttgcatgggcctgcaattcagcgatgagaaaactaagaaaaaggttcccctgagtctctctggactttcacttagggggaaaagtaatccgtacaaaataatgacttcctgaccccagttcctggagaaagccgagagacagcttctgctgaactcagaagtgctgttttcctacgtgaactggggtaaaggtactgaccagagagaagctgccctctgggcactggcatctcttctgggaacagggttttggcccttctgcaagtggccacagagatcgggttacagcagtgctgagctggagtaaagtccaggcctggggtcaagcaaggcctgagaactgttcgggaactgactcaccccaaagccctcagccgaagaggcaggtcccagagcccactctgctcacctctcagagtgaggggcttcggcaacaccagtcctgcccacttcagggaacagtgtaaaaacaagggaggcttgagaattcaaaagttctggtaaaactatgtatgggacctcttccttagccaggtgcataaccctgctgatctagactttttaaaaatatcccaaattccctctgcctggagtgctttcttcaatctaactatacctgggcatttcttccccatgggctaagattcaaaacaagtgtggcttcctccctgaaggtaaatccacatcccggcctagcaggggcccctctgctggctctgagagcattgtgtgtgacccccccaagtcctccttaaactccccacttcaaggatgttgtttcttttcacatctcactcttccacccaaccacgagctagagaaagacattgggactcctccccggcacagggtggcacggttgatagctgtgacctacctgaactgtagacagcccctctccgcctgaggaagaacaggggctaaccaccatgtctgggtttcatgtagggtttgtctttcaccggtgagggtaaagcttttgaaagagatcctagagagaatgaaaggaggggcctgggagtgagaggagaaataaaaggcttatagggagcacctccctatagtcacaaaggccatccttcctggcagattaattaaacaaaagataaccatccaggaagacaaacttaaaaaggagaatcctctaggcagattaatgacagaaaccaacgctttcaccctctgcccacttcctttggataggtgcttttgtgcagtacacaaaccgcacagccagatatggcagccctgagaataacattaacatatcacgtgccgagctccttttaagtgcaggtgctagatcaggtgttttgcatatgcgatttcattgaatctccatattgactctacgaaacagggactagtgtcctcattttaaagacaaactaaactgagacttaaagagggcattttctcaagggcacccagctaaaaagcagaagttagccttcgactccactgtgctggctctggacggtctgcttctaacctacactctgctaggtctcaggaaagcaaatgcaaacagatgtctgcacacatcctgcaaaaaaactgatggccaagaggaaacatatcccaggagaaggaattaatagacttcagaaaatgggagatttcagacaaagggcagatgtcttctggaacactgcacaaagcaaattgatggcaaatgccaacaggtgtctgttttaggagagggagcacctgccagtgtggggaacgtggtggctgaggagagggtgacgcagcagcacctgttctcttaatgtgacatggccaaaggcttcttcacagttggctgaaattacaagacaggaggatgggcagccctggcttcagaaaactggtctgtgaagcggataaagaagacagaacaaagaattctgatcaggcataaaacatttgtcggaggaagaagtgctgacgcccttaaatttgcaaaagaaacaagaaagaggccgggcgtggtggctcacacctgtaatcccagcactttaggaggatgaggggggcagatcacctaagatcaggagttcaagaccagcctggccaacatggagaaaccccatctctactaaaaacacaaaattagccaggcatggtggcatatgcctgtaatcgcagctactcgggaggctgaggcaggagaatcgcttgaacccaggaggcagaggttgtggtgagctgagatcacaccattgcactccagcctgggcaataagagagaaactccatctcaaaaaaaaaaaaagaaaagaaaaaggcataatatatagtatataaatatatattaaataaatactaagtatttatataagcatttagttacttaaaatatgtaaatatttagttactaaataaaaatatatatcttatatattatttcaatactaagtatttatataaatatttaattatttaaaaatatataagtagttgtttaaaatatgtatttatttaattactacttatgtaagtagtatttgttatatactatttatttatatttgatatttattactaaataataataatactaattactaagtaacatttattattaaacactaaatataaataaagagtatacaacaaatactatttatacaaataaatgataatttacataccatttacttatataaatatgttttctttgagaaattaggagatggttgtttagtggtgtgaagatgatatgtttactgtatacataatacattatttttttagaagcctgctagcagtacattgagtaagttatatgaaagtagttagcaaatgcaaaacttgatttaaatctaaggtacatttgggttcatgtatttcagaaatgtccattaagcacacccaatgttcaagggcctctggtaggacctggggccaccaagatgcattggacatcaagcctgccttcaggagcccatgccacagtgagaagtagataatagagtatcaagagcagacagtgggtgacattccagctttggcagtaggaggtgcgttttctgtagagaatttaaaaacaataacaaaactgacaaaaagccagtaattctaaacaatatctgtgataaaatgcttctccaaaaaagttagggcttggctcagtgcagctggctgtctgtttctgtgataaagttttattggaaccagtcactcttattcatttacatatttattatctatggcagctttctttcatgctacaacggcaaagttgagtagtcgtgacagaggccagatggccacagagaataaactatttactatctagtccttaacagaaaatgtttgctgacctctggtctgagttataaataactgctgcaattactgttgagtttcgataataatatctatgtcaacttcaattagcacatctttattagctgtcctttaataaacatttggttctacagggaagttaattccagaactccagttatatagtgttccctaaggactcagctgcatgtatttgttttgagagtctaagtttgtcactaattgaggtctattcttatctccaacccatataacattcttggatttaaagggcggattcaaaatagttgatgataacactctgattataaagtccaaaaaatcgagcttgaattacatatttttttgttctatgtgtccctttggatttttaatgtttaaaagttaaaacaatgaaactgaaaacttaaaataatgaaaccgagtgtaaactacaaggcgtgataattttgcttggtaggcgcaaatattagttcccacatggtgtaggtacagaatttaagtggtattttaaaaattgaaattaatgttgtagatcacaattattatatgagtactgctaaaagtaatttgtggccaggcatggtggctcacacctataatcccagcactttgggaggcagaggtgggtggatcacctgaggtcaggggtttgagaccagcctggccaacatggtgaaacctcgtctctactaaaaatataaaaactagctgggcaaggtggtgggcacctgtaatcccagctactcgggaggctgaggcaggagaattgcttgaacccaggagacaaaggttgcagtgagccaacaaggtgccactgcactccagccttggcgacagagtgagactctgtctcaaaaaaaaaaaaaaaagtaatttgtcacatagaagagggagtgtcaactgcattatacctccaaatgtaaatgatccttaaagaatgactgcatgaggaataagggccaagtgtcatgagaaatgtgccatgacagagtgtcacagaggtttcagaggaggacagtccttccacatggaggaagtcagtcagtgtgcttcctgttgggaggaaatgctcctgagaactgccgtgatgcccatgaggatgcgagtgtgtgtgtatgcttgtgcaccagccaggatgaacgtgcacaaagagcaacctcccttctccccatgcgaaacatatggagaacttggtgtgggttcttcaactccaagcctgtgcatgagactccagataattgtcgggattgcaccagggggaagggagggggaaaatcagaaggaaaggctttccaatctcccctgatcatttgctttcaatccagagagatatattaatggtatgaggatagcggccttctcagtctagactctgccacaagagaacatgcctccaggtcaatcaagaaggggccctgtgcagacaagtcaggctctgcactggaaggtcagaggcaggtgtggttgcctttaggacctgcaaatcttgcaagagacctctgacttggtccctgatgttccacccacatgctgtcagagagatgaaggcagcatgatgaaaggacgcagacttggttctatgtgggataaagccatgtctcaaagcctggcccatggtgtgtgtaatcagggccctgcttcaaaaagcagatgatgggccccaccctagatacattgaatgagatgctccagagaatgaggcctagcggtgtgcatatttaacaagctctctgggtgattcttgttcaccaggaagtttaaggactgagaagaaggctatagacagccagccagctccatctgcagctctgctgtccaggtgtgacctgtattcatctcagtgccaaatgagtcatcacagtctgcaagttttgtgctgaagttgctaagaaataccgaatttaagaaatatacaaatataagatattctatacatagtaaaatatataagaaattagatatataagaatagctccattttgaagactctactaagtacttacttaatatagtaactgatgaatctgtattgtgagacagattctacctccttctctctcattgtacaagtatcacacttgtagcccattttacaagtgagaaaacccaggcacagggttaagcatttgctcaagacgttaatagctattggatttaaatgtggaggcaggattcaaacatgggccagctgactctggggccatcacctttaagtacgaggcactgttgtctcccgacaagttaagagaaactgaactgttctgaatgcaaccttgagcctggaaaatatgcttgggcacatgatatagcattgttgacaaatctcaggaccactatgggaaagcaagggtcctaggctagaccgtgttgtttgaggtttatcacattgcttttgcatctctagacttccatttgcaaagctgtataacaatagtctctgtggcattttctaccttttgaaatctctgtcccaattgaagagcaaattaaaaatggggcaccaacaatataggttaagtcaggtatgaattcagcaaaaggttcccacagttcccaaagagaaatgctacattcacctgagaacttcataaaaatatagatttctggatgcaatctctcagggaacttcattcagggcaccaaaacgtctcttaggaattttgtcacttttggatgatcccggggttgagaacaataacctgcaacagtattaggatttgaaaaccttgcatccttgttttgatttttaaggtcaagtcctcacaagcttttcagtgagaaaattgtcctttttttcctctttctctgttcttacctccccccttccttctctccttcccttttccactctttcctcaaacatatattgaacacatagcaggtgctaggtcttatgctaagtttggaaaatacacctcctgcatgaatggaatgtatattgtgtgtgtgtgtgtatgtgtgtgtgtgtgtgtgtgtatttatgtgtgtacatgcacacaagagcatacaccctgagaaagcaaggaggctcacagagctatgtgtgctgccttttcttagcaactttaactctaaagagtcctggaaaacccagactattgactagattggagaacgatgataagctccttcttcaactactcttgccgggcaccctcatgactgccgttggcttctcggcccacgagtctaatcacttgtgttcattcctggcttgtgagtcacagaggagtcatccctgaccctgacccataagaagaatggtcatttatttaccctttgaaacgtgaccaggtggctcattaattttgcagcattaattctaaggggaaatgagattccaaccagcgtcattaatcttgtaaaaatacagccacgagaagagagcatcgataatcagaatgtaattttctgagttaggaagtggtcaggacattggtgtcagggatccggcacatctaaggttttcatggcattctcgccaatggcccaaccaggtcaaggcaatggttttaagcctggaagaaaaagaccacttcaaaggttgttgattcctaagatagagcttagacccttctctggcaataataagaatgacatctattgaatcattaatatctggttgttaatcattctaactaaatactttttttaaccaatacaggtctatttaagatattggtttataaagtattgctgctcagagtggctcagtgatggtcagtgagtgacctatttattcacattaatacactttgtttaactgtcaatctttccatagcctgtaatctcttaaaaatgatgatgatgattttcattaaaggaagctaagtctttttcaataattccatctacaagcaaaacctctcctaattagtttatatcctgtaaattcaatcccttattgcttttgtcttccactgaaactaaagtattatttaaccagatttatttttttgtccaatttatttatcctttcttattttcaatcattcagttgcagcctttttcaaaatacattcctattatctaaagctttggaggaaaatttgctgctgagaatacatacaaatatctgacttcggtgtcacctaccttttataagtaaaacaagcaaacaaaaaacaaagtaatgtggatatataccctatcattttataggcccaatttaatcatttttattgataatataggatgtggaaaaggtcttcagtagattatgttatacctgctcctaattattcaagacatgtaactagttatatcatctaccaccatggaaagaacgaaaaccagctaaagagggcataaaattaatgtatgacttccatgtcacaaaaagaagaaatgacattggtggccagaacgcaatgctgatgaatgaaactttggttttgtttcataattgcctgcattgacatgagggactgtgcatttagccctaataatcagataagaatcaagaggccactcacacgcaaagtgacttcaacagatctttattaaaaatcttttctcaactgcttggctgtatttcttaacacagagaaaagtttcttctaaaaatacctccttcttcttgctgcaaatcaattgctattattttctgtcaccaactggctaatacatagattgtctctattaaatccataggacattaaacttataatatggcttatgacatgcgagagattgtgtgtctccacagattgtaggcttcttctgaaaaatttatccagaacaattctaaggaaaaggtacatttccaacgtttttgtgtactgtggtgggaataacagcaacacatctatccattcttcagaaggttctagatagaaaagtcttcacatctttgtttatggatgtctcaacatttcccccgataccttcctgtgtccattaatacatactgataggcaagacaaaaataaatcagtgctatttatttttcacaggaaatctcatttccactaggcatctcaacgtgttttgacttttctcctttggttagagtgtcttcagaacatatgaaaactgtcaaatattaatgccagttatataattaatctcaccatcagcaaatttttgtaaaactttaaaatagttttttttatatttgctggaatcactgaaacagaataagtactaaatattggcaaattactctcccatgaggcttttagggtaagatgctcagtttgttatattggtgagaagtatcttgatgaatgtgtcatttaactcgtgtgtcaatggcaaattaattttgttatagaagaagaatcgacttatttttaatttaaaacatgagaaatgccagcagtcgaagcgactgttggtttaaccacatcttttctaaattggcaacacaaggcaatggtctaaatataagtactgcaattgtggttttggtttcagaaccattgcacagttgttagttaccatagttgagcagaggaaaaaaactgctcagggtagggaaaggaatttgcagactgccacggcaggttaatttagactaatttggaccccaatcatgagagtaacacatgtcctctggaattattttgccaagcttgtgctgggtaggttaacaagaaaagagttcactggtttttaaaataaaaagaacagagagatgggcaaaggtacttaaaaaaatctgatgcacaaaccatgttttctaatttaaaataccttagttggaagccaaatcttgaaatctagcttttggatttcaatgtctttcaatatgccaatggaagctgggtataacgattactacacagatttgaaattaagatttgtgttttgtttcccaccataattataccatcatgacatattatctcctcccgctttattttttattttacagccaccaagtgggctctgtatttccaaggcggttctgtagaccaaggtggcaatcacagtgttgttcacatttatttgttcaagcgacccagcaattccactccatatctctaccctgaagtagctctcacatgtgttcataagaaagaacaaacaagaatattcatggaaaaaagaaactgcacacattgttttacaatatctaaatttataaccccaggagaatggattataaatgggacccttgtatgtatgtatgtgtttgtgtgcatgagtagatacacaaaaaacaatggaatgcaattcaggagaaaaatatacctatcgacatgggtatatctcaagatacaaaatattacataaaaataatttgcagaaggctatataggcatagtcccatttatttgaagtttcataataagttgtgttttagaataagtatgtagcaaatgtataaggcaatgcataggaatgagaaacaccaaatcaagagagttgttctttccatgtggcaaggaggagaatgatattgagagccacaattgatcgaataatgtttgatttctaatactttattgagtagtaagcacaagaatctttattacacctttgaatgaatgaatgagtgagtgaatgaattcagttaatcaattaacagagtgctatggcttagatgtagtttatccttcacaaaactcatgtggaaatttaattgccaatgtaacagtgttggaaggtggtacctttaagaggtgattaggtcgaaaagatagactgtctttctcaagagactgggttagttttcttgagaatggactagttgcctgagaacaggttgctacaaagtgaggctgcctctcatgccctttgcatgctcccacttccccttcctcttctctgttatgttttgattcagcttgaggtcctcaccaaagccaagcagatgtcagtgctatgcttcttggacttctcagcctccagaatcatgagccaaataaacctatcttctttataaactacccagtgtcaagtgtttttgttttgttttgttttgttttgtttcttgagacagagtcttgctcttgttgcccaggctggagtgcaatggcacaatctctgttgaatgcaacctctgcctcccaggttcaagcaattctcctgcctcagcctctgacgggattacaggtgcccgtctccacacctggctaattgtttttctgtgtgtgtgtgtgtgtgtgttttttttttttttgtatttttagtagaggcagggttccaccatgttggccaggctggtctcaaactcctgacctcaggtgatctgcctgcctcgggctcccaaagtgttgggattacgggtgtgagccaccacacccagcccaggtgttctattataacaacaggaaacaaactctgacataaagtatactatataaactattctttatttttttatacatatgaaatatttaatgattattctttgcaaaaatctagaaaaatgattaggggtgaagaactagaaacagtttctttctagatactgcttggagcaatcagcccattttaatggtgagcagcagagtttaatcattattcagatgaaggtgtgcagttttgaaggcaaagggaaagatgcccctgggaaaagagagatgtaacattctataaagagtgatgatttaggtcaagggtccccaacccctgggccatggaccagaaccaggccatactgcaggaggtgagcaggggacaagcgagcattactgcctgaattctgccttctgtcagatcaatggcagcattcaattctcataggatcgcgaatcctattgtgaattgtgcatgtgagggatccaggttgtgcactccgtatgagaatctaatgcctctgaaactatctcccccaacccccctggtccacggaaaaattgtcttccacaaaactggtccctggtgccaaaaaggttggggaccactgaattaggtgatggtgtttctgactaggctggagagaatggcatcaacagagcagatggaagagtagacttctggtggagaatgacagcatttcctctgaggctgaaatgagattaaagacagaatcaaagagaccaaaattcttgcatgttcagaggaagttagctaaagaagttcatactgaatgtcgttgatttcagcaaatgaagaaggtgaatgacctgccaaagcttttcctggcccaaagtttcatgtttcttctccttctttgtgctctttcatggcactgtttcatgatcttctatttacttatctgtcctccacccaaccttctaacaataaccaataggtgataaactctttgcagggaggtgcagcacctgctttctttacccttacatcttcagcatttagctaccattcagagtaggaaggagatgatcaaaaaacagttgctaaacaaaagtcaagaggcagtattaagattgtatatttcaggagggagaaggcattatacaacttctgtagggagtgttttaggctctacagcctaaaggaatgaaagatttatggattaaaactgaagttgctccacacatggatcaggtctgcccatgtccaagactttcttcagtgactctccaaagtctaaaatcaagaaccgaaaagcagactttgagagtaatctggggttgtggttggctcagcaggcctaagagtaggtcataggggccttgagggtccccagtgagtgggagagcacagctgaaatgtttgaccaaggaatttcagctgggcagggcttaggagtatcaagtgggaaaacgaagtgaagcaggaagggggaagattttgaaggcctcattggagacaaagggcatgaacagcaggggtggaggggagctggtggactacctgtgaaagtagatgggtatcagttgagtcagaagggaagtagaaaagatgagagagtagagaccatcagaagaagtagagaagaggagcagagatgatggggcagatggtcgtaggaagtggccagagagcagggacaataagaaaggaaatggagcaaggtgcatagaccagtgcaaagcaaagagaaggcagactcctctttctgtctcccaccagtgatcttaactgaataggtagcaactcaggttaataaaagtagcaaagaatgagtactaagaatgagtaactgcatgcaattgaaaactacacaatgagaaccatggtgaagtggccaatcagatgtcttcaccactgaatgtggtcttcaccactgaatttcccaatccacaagcaatcgaattgtgctgactttttcccatgattgatatgatcaaatgaatttcaattttagcatagattcagctaatcttacataagcataaatcaaaaatataaagaatgataacaatggacatgcctgctgttcctataaatattattatgccacaatagatattcataataaataattagatcaatatgtaattgggagaaacttcttcagcttgtcattttgtaatacaaaaaggtgaattaacgaaacttccaagtttctttatcaaaggaaacatcattgacaagcagaggagttctcagaaagcatgtactcagttccctaaactgagacaaatggtttccatattaaaaatatatttaaaaaacacccaaacccaaacaatgtgaactaaaagaaatgcaagtaagaactactttgcaaaatcatgtatgacctcccctccctgctcaaatctgccagtgggatgtgacttttccagcctcctggctaaaatggagctcataaaaacatagctcatagatggcagaaatcatgtttgcagcatatctccaacagcccttaaatataacctgatttaaaaaataatctgaatgaagaataggaaaacaatattgaaatgtatgattcatattgaaatgcaagaagggcagggaggttctgaacaaaaaattaatccaagcatgtgtaaatttaatttggccaatgtaagatgacatcagttgttgagagatttccaaaacatggtcatacgcaatcaaagtgttctgtacctgagagaatatttagccatcctttcctccctatgtgatccctttccttttgcaaacctaaaggacataaattcttaaaatagagcaacctgcactatttcttaaaaaaatggtaagtattctccactacgaaataaaaagaaagaatcagagagaaatcgggatcttaaaatgctgcttcatttgtccacagagcatgcatcttctagcaatctgacagcaatgacttgcctaaaactgggcaatcatttcccagagagcagtatttacctaattaagagcttctccgtggtccccagttacttaattgtgtcattagcaggagttttgacatgaagaacaacttgtgtctagagcaccagcctggcctccgttagggaaacccagcggagcggctcccaggggggctggcagcagcctgctgcagtatgtacagcacaaaatagaataattggtccccagaggggctgtctcttcagctgccaatagggattgtttttttccttgtgaataaaaagccaagcctccatgactcttctactgaatattaacgtgtgcctctggtgctcagcggctcgtgggagggattaggtcctggtgattgttacagctgtcctctttgctgccctaccgttgatgacagcatgaaatcgacagtcctgatcaagggaataatgcggtcaagcttcctgatagtcaaatggataaaatgtgcagtgtaccatagaggtgtccaactgggtgggatcataggggttaaacttcagcctgggggccaaagggatgctctgtcctcctgcaatatgacatggcaaagggccggaattgactgagactgtcaggaggtcaggtggggggttcctggtggtccttcctttctctagcagaaaaagcaaaagaaaaagggtgagcacaagtggttataaatattttcccaggggaaaaaaaattaagtggttttagaaaggttttttttttttttttttttaaaggcttttaaaaattgagatataagtcatatgtaataaattcaccattataaaatgtacaatttagtggttctagcatatttacaaagttgtgcaaccatcaccactgtttaatttcagaatgctttcatcaccccaaaaccgtggacccattagcagtcacccattcccccctcccagccactggtaaccattcgtctactttttgactctatggatttgcttattctggatatttctagaaagatttttgattaaagagtttataagtatctaatatggattagagttcgcaagtattaaaaaagtgacagtaaaactgtggtgggggggtggaattaatctggagttcataactattatctggagttccagtttgaattaggatttcaaaaactgatcatagagcagaacaaaggattgtcacgagtacattggcttacctcttttcttattctttcaatattaggattagtaaaattcatcatacaaacttaggctatgtttagtttgtggaaagcatttttttagactagcacagggaaaatatttggggaaaatattttcgtttgcattatgagtgtttattgtggagccttttaaattcaaaactgtgtatctttgtctttaaaaaaatctgtttcttgtaaagtgtcttaaaaaaagactataaacaaaaatattttaataaaattttactctctgaaatgatatttatatttaatgaatattaaatataaatttatttttatatttaaatgaaggattcaaatttatttagccaaggcaactgcttaaaaattatccatatatatgcataggtgatgagggcttttattgaatattttaggacaggaacttatttggtataaggacactgaaataatttttggatgtattattctccctctattttctcaaaattgaattataactattggttcaattttaccattggctttctcaatagcagccttaagatcttaactctagaacacctgccatctttatggcaagttaatgctaacgttttgttttaagaagagctccttggcacatctaacatcgaatagttagttcagaagaaagtgtttgctactaatgaaagccacttcttttatcgcaaggtttcacgttgggcagtattttagccttggttctaccaaaaagtaaagcttgagacaagggcttgcatatagtttattttgggaaaatatccccaaagaacaggagtgggagactggacagaggcaaatggaaggatggaacttccatccaaaggtacattattgagtgaaatccagaaagcacaagctagccagtgcagctcaggcaggaggctatgaggttacagatgggaagatggtggttgcaatgcacggctggagtgaaatgtaggtgtgaggggtgtctcataaacggtatcctaatttacacgcttggtggacacttacaggacatggtagatctatgtctgtatggaacttctcacaacaaatctttttcaatcaacacagctttagaaattctccaagttatcttgtctcataaagacagcagatgccaaagatcagcaaggagagttcagcctagcgagacagagatgcgggatacagaggctctcctgtggttcacacagaaagatgggaaccacacgggaccagaaatacggaccagggtcaagaactggtacctcaggatggagaaggcaagaaccaagtggaaccacgagagggatccaaggtgacctgaagctcttctctcggccagactgatagagagaagctcggcttctcagtgaggacacattggaacctgacccctgggcctttatgctcctcagatatgctgagggatatgcagacctcatcccagagttcaaattcagccattctcaaccaaacattttgttatttcataaagactggtattaaccaatgcttcacagtttattaagatagtacccgagtaaggtggactctgcctaattattagaaataatgttttcgatttcgtcaaatacagctggtggaagagtaaattgggatgacctttctggaggagggcaagtgacaataggaaccaaagccttaaaaatgtatatggccttggcccagcaattccacttgtaagaattgatactaaagtcaaaagctgatacatcacaaagatataacatatatataagaatggtcactgaaacattgttaataacattgagaaattgacaataagtgttaaacttatttgaggaatagttaaaagtttggtatagccagaaaatgaaatcctaggaagttataaaaaattatggcaaaaacatgtacacattgacatagaaacataaccataatattttaaagtaacagagtgagttaataaacgaatgagtccacttatataaaattacagatgtgcagagaagcgtctgcacagatatttaccacattttaaacagcactcatctctaagtaacaatgtgtcaggaaatttttttctctatatatttatatatcatttgggattttataagtcatactatcatttttactccctgaaaaaacagtaaagttatttccagtttgaggaatatcaattctagttcccagatcaggcaaaaacctgtgggtaacccccatcttaccaggtttagcctgggtgtgctacttgttacaacaacacaccatgattatctgactcagggtgtatttccaccccattgatacaaaaggttttggctgttttactttggaatgggggaagatgtgtcaaacctttacactcatgtgagtaacaaataatgtcccccaaatctgaggacactttccgtctttctacatattgtcagcaggctcatccccaatgtgccaatcatctaacccaaaaaacttgttcttggtttgctcaggggacgagtgagtcattaaaagactggcatttgggacatagaaaataagatcagtatcaggagaatgttcccctgtgaatctgtaaacttccctcttccttctccatctcctcccagtatttgctcggttcatttgaggatcattccttaccctatcatactttactgcaggtagggcttgcgttattagtggatgcattgctttcaaatattttatgcaatatattcaataatacatggtgagaatatgcaaactacagatcatatgctgataaagtgtactctgccagtctgttaattagcttaatagattaattagattgatctgctaaataacaaataagcttgtcagaaattcactgctgcaacactgatgactgccttactgttggcttagaagcacatgtacgttctgattcatcaaaaaattaaacgatgcccatcaaataattgcattgtattctaattttctgctaattggtaatttatacacggtagtgatggaaaaattttcattaataaaacattcctttctctcttgatgtcatatcagcaattcactacatgctttgtaagtagtctcttctcaagcccatatattttttccctccagttcgatagaatcatttactatattgagttctggaagggaagaagcaggaccgcatcttggaatccctgctactcagcatcttgcactctggaatcctctcttcatgatgtacatgtgactgacagaggttgctgtttgttcacaccgtccctcggacaaaactgtgtatccaataactgttgatagatgcttgtgggtgacaggcgttttagagaggaacatggatgactggctcacacagggcttcaccaatgggtggcctggcaggggaatcagctgcagatgcccttttctgacttgcacttgacaggggtcctcttccagcaggcaaacaacccaagcttggaccttctcaggaactgacaagtctggaccaacccaggaggctctgtctctggcacagcccctggggcgtaacttttgtttccttttgtcgcctcaagagcacagaggctttttgataactgctttagactgttttaattttgatgatttttcttttaaatatagaaacttttttataaaacaatttttccttaatatcttctgtccttatttacttcatttcctgtgattttttaggagcatgtaaaataaaggatgcataggtcctacctccagggatttggatgaggtgagtctgggctgggccccagacttcctcactaattaaaaagcagcctgagtgactctaataggccgctgagtttcacaaccactgctggtcgctcagtctcaaagagtgggaaaacacagtctttgtcttacgtaattttctggcacaaggcaagcctcctcatcagtcatttgtaattccaatatttattgagaacataaatatttatcagttactgcttggccctggaacagagataaaatactatgggctggaagcacacaggtagaaaaactttagagagtgtgccttaaatcaacgagtgtagttatatttcgtgaacagaacaagcctgtctcaaaatttctaagtgatcctttggaaatggcaacaagttgaacattttgaaaagggatgttgaaaaaggataacttatttgcatcttttcagaggaatggctaagaaacatgtttggcaatgaaaccatgttcctttctttcaaacaaaaatgttactagaactttgatatacaccagatctaagcagatggtaagaatacgctatccatagatcatatgctgatgaagtatattatatactagaactctgatatctactagacctatgtggtgttttatgaccacactgtatttaataagttccagtttattgttgcttggaggactcttcttccccccccacttgtttgaacatggacagatgtccagatgtcccttgggctctgctctgagtgtctcttctcactgcttccagatcagttgggagagttggagaatgggcatggctggcctcatcctttctttattcttcaggctctaatttctcatcagctgagtccaacagggaagacctgcccctggctgcccgtgccttctctgatgagtaggtaattctaattctggggttattaagaaaccattattgttatctaagcctccacagcctcttccaatctcgcttttgtccatcagtaaagaatgaagctacattttcacctccataggtctgacttctgttcttgcctctcactgaatgaggcagagtaaacaagcatactttctgaccttcctccagtcctaaacaataatatttacttatcacaaggtcactttgtgagagcggtacaggctgatatgatatcctgggatcagaattgtaactaaaccttggcagcgttgtggttcaaggcacagagtggaacttcatggtctttgccatttatcagcaatttgacctcagggaaccacttaacctcctcatacctcagttgcctgatctggaaaatggtaccttccttataggatgactgtgaagtttacacaaaatgatattagtacttgaggaaaatatttgcaacattttgacagtacctggcatgtaataagtagctcatgtgtgcttgctaatattattatttatttcattttatggtgacgttttttagttgcacaatataaaaaacaattcttgagtcactgcagagatagccatatttagataatttttttcatcatttaaaaaaaatcagccttgaaatgtcaagaccctttatcattaaatcaagatgaggggaaatacttcagtctgagtctgaggtcagctccaaaccaatgaatgtcacagaataaaatcataacaagtgtagcaaaattcagtaggtaacatatctgagtgttcccatttattacagagttttaagtgttcgaaatgcttttaaatggaaattcaattaaatatgaaaatcctaaagaatattcttggagcatggagatccggtgctcgcgactgcacctgattaaacatcttccctgccagcaaggcaggacttagaatgacttgctaaatggagcttttaattctaattggagttacaaaaaaagaaaagaaaaagaaaaaagctgattttgagaactacaaattgaagtttggaagattggagaagtcctctctgagttactctttctatttctggcaactctgctgactgcacaattccaggggctgcatttatgctgcaaggatgtaaacaatgccccaaggtagttgaacaaacagtcttcagaactttatccacttgcttcactggtgattctagagttgcccttggagactctgaccaatattattatctcctgtggtaagcagaataatacattgcccctcaaagatttccacatcctaatcctcagaacgtgtaaatatatgaatatattgccttgcatggcaaaagggactttgcataggtgataaagtgaagacccgtaagatgaggagaggatcctagattatccaggtgggcctagttgtatcttagggatacggtaggtaacatatctgagtgtttccatgtattacagagttctcccttaaaaagggagaacctttcccactgtgatgagaagaagatgtgcctgaaagaaaagtcagagaggcgagactttgctggctgaagatggagaagggggatcgtgagtcaaggaatgagggcagcttgtagaacctggaataggtaagttgccagatgtaaccctagagcctccaggaaggagcagtcctgttgacaccttggtttcagtccagtgagacttgtgttggacttctaattccagaatgaaaaataataaatttgagttgttttaagctaataatattgtgataattttttacaacagcaataaaaatctattacgtatagcaaatatacagaatgtctagcaagatagtaaccattctttagtgagttttctctaactgtaataataataataataataataataataataataaaaagctcacatctttattgacaaattggacctgactggaatgtatatcatcattcatccaaaaacataaaatatttgctgtctttttcaaaacctaccgggtgatagacactatgtgaaacctaagaatacagggatgaaaagaagtcccctcctgtgaagtcaactttctgtaggggacaagacaaattcctcttcctttcttctccttcatcttccttattcagtgggctaaatgaatatacctggcatttcttaggcattaatttaatcaattcttgcaatgattccaggaagtaggtaatattatcgctatccctgtcttagaaatgagaaaactgaaacacagatagatgaaaacttgccaaggtcatttgctaataaatggtggagtcagaatataatcccacgcagcctggctccagatcctgtggcactgactattacaacatacagcctcacaaacaaataatatcaatggcaagttgatcagtaaaacaatagagatgagagagagggcatcatgcacagggtgccatgcaaacatcaaagtgatagtctcctttgaatgggatggaaagtgcttgctgattcggcaacattttatcttagcttatattaataataatagctaacatttgcaatctccctacgtatgttacctctggttgcaaaacaatccaaaacttaatggcttgaaacaataagaactcattgatactcattagagtggaggatatgggatggatttcctggaagaggctaggctcaattgtgtacctgtggtccatttcaattcaggtgggcagctctgctaattgagcctggactccctcacatgtctgggggttggctggctatgggttgtgctgcctcaatcacactcacatgcactcatcctccagcatgctagcccaggcttctcacaaagactggcaggcttcccttaggaagcagccaactggccaggcatgacttctactgcaaactggccggacatgacttgtattgcaaactggccaggcattacttctactgcgttctactgggcaatgcaagacacagggaattcaataggaatcaaaggggaaagattcaaggaaaagtaggctctactttttgatggaaaaagacaagaagtcacaatgtaaagggtctgggacacgggaagcgcagagaatcgggaacattttagttatcaattgaccacaacatatattcgttcattttaacctcacagcaaacctctaatctagataacatcatcgtatagccatcccttggtatccgtggggtaattgcttccaggatccctctcagaaacccaaatctgtggatgctcacatctcttttaaaaaacagccctcagagagctgacggtactcacttgctagctgagtaaacagtggagctagaaccagcaccaggagccccttgatgccagagcctgtaagggcagcatcctgtgtgcacacagctcacaggcagagtggggccacagggattctccactgcctctgtctcacagaaacacagccacatgatatggagactcacgaggcttgggggtgaacagaagtcaaaatgtggttcctggcaacaagacctgaaggtgcagatcacagtgaactatgaaggatctgatgcagtccaagagagaaataagtgactgaaccaaggctgagatgattagaagagagaagaatcgagagacagttaagaggtagtatggacagggtgtggccactggctggatgtaaacggtaagagagaggggagatttgaggagcatgaaaagatggagataacgttaacaaaataggcaacttaggagaaaacaggcttgtggggattgcaggcaggtggaggcacctcattcatccctcatccaatgaagattttagtacccattatatgcagatactgttccaggcacttgagattcatcagggactaaatgaacagaaatatctgcctcacagagctttcattttacggaggagagaccagcaatgtacaataaacatgaagaagaagcaagttttatagcactaagaaggtaataattactctatgtgttagttacctcttggctgctgtaacaaattagagtatgatggttgacttcttataaatattaatcacctcctgttagctctgggcactcagtgaattattttatataaatctgataaccatcccagtcttctgatgtcaccctaaactctatattttaatactactgctaaattcacagtggatcagagctgtcttttgacagattaagttccaatatcaagtcctgggccctaggcaaataaaatatatttaactaatctgatgcagctgatagataccataaccagcaggaagacacatctccagttaattgaagcctcagctttagtattaggagccagagccatgcttaaggagtagccaaacctgttgggtgactatgtccagaaaaaacagttctgcatcagtcatgccaaaacagaaagtcattgtacctggtaaaaaattttcaacatttaatggaaactgcaaactgacttttcctagtcagtcaaatcacttggctatgtgagcatagaattcatagctgatttctctccagaggcataatcggcctcatattggcacacttccatggctaacatggccacttggaaattcttgccattaaaaactttcagacgaagttcaccttctccataatatataaggtggaggccacagttatgtacatgtatgagagtgtatttaaagattgtagtcccttcccatttcccacatcccagcttctctcaaagtgccaccaggcttcatggttcatggctgatagggtttgtctgtgtccccacccaaatctcatctttaattgtagctcccgtaattctcatgtgtagtgggagggacccagtgggaggtaattgaatcatgggggtggatctttcctgtgctgttctcgagatagtgaataagtctcacaagatctgatggttttataaaggggagtttccctgcacaagttctctcgtctgccaccatgtaaaatgtgcctttcaccttccatcacgattgtgaggcctccccagttacgtggaactgtaagttcattaaacctctttttctttataaattacccagtcttgggtatgtctttatcagcagcatgagaatggactaatacaatgtttgtgctgcctgcccccaaattcatctattgaaattctaaccttcaatgtgatggtattaagagatggggcatttgggagggcattagatcatgaggaagagacctcatgaatggaattagtgcccttataaaagctgcccaagaaagctcccttgccccctttctacccctttcaatgtggggttacgttgaaaagatgaggaaccaggccccacccaacatcaaatctgccagtgccttgaccatgaacttcccagcctctagaactgtgagaaataatcttgtgttgtttctaagctacccagaattcttttacagcaggctgatcagaccaagactgcccacttctgaattaacgggaaaaggttcactttctaagatgcaaattaggctttcaccaaagaatggcctttgttctacctgctggggccttatcttaggcagtggttctcaatcttgctgcttcttaaactcctctgggagcaactgtagaacatcaaagcctccaccttcctctggccagttgagtctgacacataggggttggaggagagggcaggattgaactctccatgtgattctgaagcatgagagggctgagaactactgacataaagcatatggagctcttgttttggtcaacatttgcccatggcttaaaccatgatttgcctctgatccatgacttcccaagagtttactttagatatcttacatttaataaagactgggtaataatgatgataaattggtcatgatagaagccaccatttacaaccactgaacggggcattgtacattttcttgtttaatcctccagcagcctagcaaggcagctatttaccatcctcattctatggcttaagaacttagggtcagagaaaaaacttgctcaagaccatacagtcagtaagtaacagaactaagatgcaaatgcagattccaaagtcaacgcatcaatagaattgtaatacagggggtgagtgctgtggagctgcatagggtcaggaacatcagcctaatcctggctttccagaggaagcgaatcttagctgtaaccaggaggataagatgaagccaagctggaaaggtcagagaagggcactgagggagggagaggggcactagagaggaggcaatacaggaaggaaagagtgtcccaggttggaggaagaggatgtgcaaggcctggaggtgaaccagaatgggctggtgatccaggtgagaatgaacatgagatgtccccaactggctcaggtaggaatggcaaagtgtcgaaatgaacacgttaggggatctatggaaaagagagcacgttgagtgtacagaacctgaattcactggaatttaaacgcgaaaagtgcatgcagttggaacgatgacgtgagagctcattacaggaaatgggagaaaaagaaagccctgctgttaagaccatgagatgtgtttctctcctaattgtcaccatccattctagaagtggattggacattatctactgtgatccttgcattcacctgaagaatctaagccttggagagggtcagcgacttgttacaggtcctagtggctgcctaaatggtcctgacctgggcctgtaacacagggtgattgaccccagagcaggtctcttttccattttgtcccacgtggaggtaaatcatgagacagaatagaaatcattttgcttaatttaaataataaaggatagtgcagagacggcttagctgcatgctgctagcatggcccacctcccctctgacgtaggcagctcctacctacatcagtggtccctcacctgggtgtccagagcagccactgagcacgtgcacactcctgggcatgcatgtgtgagtggcttttgcaggaagaagattcagtgcattcttaagcgtattgtatttccatagctctcaaagggactctgactcccaaatatttttacaatagcaaagtgcttttattaaagatcctaaaaggcacaatttttttttcctaagcctacatattcattactgatgaatagttttatttaatagtatttctgcatctggctttgccaatgcacagctagtttatgtctacatacataaaatagtctgagaggcagaatttccaatcattgctattaccaatgacaatgactactgcttactaaacacaatatgccacataggatcccaagaccttttcctgtattattgtatttaatctcaaaagtagtctgtgaggtagatactgttattataattttcatgttacagagaaaaaaaaaccctcaaaaataaaaagattgagtcacttgtcctaggttggtggttctcaaagtgtgatccctccggcagcatcagcattactgaaaatgcaaattactgggcccacttcagacctagtgaatcagaaactctgtggttagaggccccaaatccttattttaataagtccctctggtgattttgatacctttagtcatccagtttaagaactacagtcctagggcatccggttagaaaatgatgcattttatttactgctaaatatagcatcattgcccaaatcacacagctggtaaatgacattgctgagattcaagtcagggaaccaattgctagtttaccctctctgatttaagcggtgtagacatagacagtctaactaggttattgaagccttaatccccattgggacttaattttatgactctcattgatcaagcaacccttggggtcaagaacctctgctcagctgtccctattggtttgtcttgcaccactgcattctcagtgtgggtgtccaaaccctggtgagctccatatctgagctgtatgaccttaggtaatttttactagctttaaggaaagccatttagcagattttaattccaaatccacctggtaaaaaaaaaataatcaataggtcagataatcttcataaaaaaattgactctttcttataagacaaacctgtaggagcatttcacaatggcagccagaacctcattttaaatgctgccatggtacaatggcacgatgttgaaagatgaagcttgtatttggtgtgagtgaggactctagattctgaagctaaccacattagctggaaagacttcgtgcataccagaaatgtagaaaatactgcatccactcacaaacaacaccctatgtcaccttaagccgtggcttaatctctttgatttgactttttccctccaaactcattttaaggtcttgaaaatacacaatgcagctgcaaagctacactttgggactaagaacaagtttgggaataacgacttgaaattggattcgatgatctcttttcattttataagtgttatgaatccactggcttcttgcatgagaaaggagaacactttcagcaaatttcaaccatctcacaaatcacttcatcacaatagcttaatattccgattgtggactttacacaagatgtgacatcaaacgcaggacaatcttgaaatggcaaatgcctggagggagctgccggccacggagtctgaattacctcataccttgaaattagcagggcctcctgatcagggagtgggagcaaaacattttttttcttttattagtaagtcccattaactctggttctagctttcggtactccctgcctttcgtaaggagtgtcaccctcacaatgacacaatgttctgcctgtttgcattactaaacacaggaggtgcaatggggaagcaggctgctcataaaaatgagttcagacgcttgctacagacgtgacaaataccaagctgatttttatgcagggaatcctgtctcattttatgtgaaaataaggtaataagacaaaaggagctataggactccaattttagcttttttaaaaaaaacaacatagccatactgatatcctatgaatcactacccctgcagtggagtcattttttacggggtgtgtgtgtgtgtgtgcgtgtgtgtgcttgtgtgtgtgtagggagagagagatccctctctacccattagtataaaagttggatttctcaacagcttgacaatactggaaacgtctcgtcagtggttactccatcatgataagtattattgtgtgatattttttttcttaacagaatgaaaacagatgtcatttgatattaatgcctaaccccaagtcaatggtaacaatttaagaagatacttgaagaaaagaaatgaaactgtaaatagaattgttataaagtaaaaacttcaggagtttatttcatcttttaagaaaaatcagttccatttctttctctctctagagaggtagacaaacacacacagaaattctttctcacttggaaagggtagcgccatttaactactgtagtcatgagatggtgagggtggtagccaggaatggccctaagtgatcagcaggatcagggagagaaaaaaagcaccctgtgagaatgctgaagggtttgggaagtgtttctaacatttcaccagtcgtttttacttagcagctttagattttagattaaaacagaggagagatgaggaaggcagacaccaagatggggaataacagggcaggagcaacagaaacaaacagacacattctcaaaacccatttgtttctgttactggggctattctcattcctttctctttataccccattgataccccgatgtcctcttcattttccccagttgtagaatttcagttggcctctgacgccatgagaagaaacgaactcagtccaggccaatgcaaacgttttcctacaactctctcccactttcccaaaccctcctcccccagcagtgtcttctaatggcttctgtactcttgatttaaatcgccctaaatcccatcctctcttctacttgatcctaatgactaatctgttctgccaagaagagatgacacttcttgtcagcccttgccttcctgtggtcaaaattaattcgttcacccaacattcattaagcacctaccatgaggtagacagtggcaggcaacgccatcacaatctctgcccttgagaaaccgccacaactacagtgctctatcattctatacgaatgcagacggcacaatcattctcttttgaacctagaatatatattttcaaaggttcagatctaaaaaattgtttaatgaattaaagtacctagcaaactctcctggtcaaaaatagccatttaatttaccaaactctatttaatgcaaggattttattcttgggaaaggaaactaattccttttctattgtggctttcagcctggtctgactatcagaattaggttttggatctaatcacaaaattaacttgatgatagcaaacacaaatcgtcaaatcagatttttctaccaaataaatgcaatggaaacaagatctctcctatctacggaaaccatgatctcatgctagaattttagggaaataaagcttgaaccctaatgactattcatatcaggaaatattatttcttgtttgttgaaatgtctacctgtaaggaacaaatctaagatacttgcctttaaaaagtttaaaaaataatttgaagaaaaaaaaaggaaaataggtcttgtgtcagtgttgagttagttcaggtaattatgtttctttctcctaaaataatcatattttgtaattaaaaaactcacaacagcctttcatcgtatttttatacattcccttctgtgttattgagaaacttgtataagctcacaaaatataagtatgctctgcttctcatgtattttttcctttggatggttttgatttgtttttattgttgctccattgagtaactttataacaccataacattttgtagaaaaggattcctagatgaatgaaacctttctgaaatcctaaaaatcttacctttgccaagctagccttactggcatgaagcctgctccacttcctggttctgaccaataattttctatgcgaacgtcatcatcaaagcttgcaggacaacttgtgtggagcatttccagatacccgtcctcccctctgttatttcagtcaacagctgctcagcctgttcttcccatcaccgttcatgattgcgttagacaaaaatccacctttaaataaactgtgaaaactgagaacggcaaagcaaccagtggcaactaagaggcactctgctgttatcaacctcagctcacagtcttgggcgcatgcccagcaggactaaattctctatacagcaagggagagtttcagctgacctgctgtgaatgccccaagtgagtcactgccgttaactccatcagtgccacttgctgtctacttggacatttctgaacagctgcttggctctaatgtcgacctctaactggaaatatggcctcgtctgactcagtttcagaagagaaaaagggggaggcagaagggaggagagaaaacacacatgcccactctcaatccagattgacaactttgtttttttctcattgattgtggtagaaataattgttgatgaggtggaaatactaaacccagtttgtcatagtttctctattttgtctcttaatatattcctcatgaagttggattgggatcttctactgaaattatacgctgctgtggaaattcacagtccttaagagctcaccccatttccatattttgtttttaacatatccactgaattttccaaacacaaaagtgaatatttcttttattctaaaaatgttgttcataatattgagaatccatttagaatcaatcaacatttttggagtacttgttagaacagacttctggggtagacattaaaaaggattctgagaaatatcagacatgcttcctggattcaagaatttataataaaatgaagagaaaaggccttgttcaaacagatggcccaggaacaagatgagacagtgtgcacagaagtgtcacatgcctgctacagctactagaatctgtgagagctcagagaaaggctctgggctggtggctttaaatccagaatgatggtaactgatactaacaactgaagtgaaattgacttcataaacatggacgatgtgtcatagctgggcatgcagcccaagtgtctaagttgaagactgaaaaatgctcacatggcctcagtatttcatttcagcaaaaatccgtgatttatatgtgtattgttgtatgcacaggcacatgtacacatgtttttaaactcttatattgccagagacactgaggaattgatcatgtacttattctcctgggatcatttactattgtgtggacagtgaacaagcaccaagccgggtttctggagtttaacccaaagaaagacaaatagatgaaatagcataaggcttcttccattttgaaggtatcttctacctgctgtttttatttcttgaaaggagatttcagaggagaataaagataggttaattcttagttttatgatgataataatataactatagattttctaacagcatttcagcatttgtaaagatttttcttgaacagtaaacagaggaatgttattccatgatcattggtgctttgagttaatttagctctctgcattatttactccacttgactgcagtttgaagttgaagagagcatggtctccggtgcttggataatgcttcctatggaatatgtgagtagacttagttactcttaaagtcatcaaatgagattggaccacaaatataatacaaaaaataatctcaaggttttaatcctgaaaagcttgcaaatattagaaaacaatggatccaaaggaaatgccttgatttggggccctaaaaccaactagtagttttcagcataattttccaattcatatctaaggctgcttgaataattaataaactatcatcggttttcccaagtcaccaaaatcacacttagttgtgagtgcgatgtaaccagattttggtataatcaagtctgccttagaccttatctacaggcttgatggaacaaaagggtttttctccaaatggagagacaagtcagaaagggaatcctctctgaagggaagtaagaattgcgtggggaatacataccatggtcgaaattacaagttgattcatgagcagtcttgctttaataccatggtgcggtgatgaacgcagaaacaggcagtgaaacaaaaatgataaataaggtaaacagattctatgggaaaatgaatgacgacgataattcattctatggaggtgagaggatgctgagaggaattcccaaagaaaacagttgagctggttctgagtatgcctttagcaggctgccttgggcaaaaagtgagagggaatttcaaccagtaagtgcaatatttattcaagaagtatttattgaaatgtctattatgtgccaggtagtattctgaataatggggatatcattttgaatactcgggatatcattttgaaaaaaaccaagttcctaattcatgatgcctatatccccacagggaaggcacagagtaaaatcaaattaatgaatgaaaaagtaagtaaatagataaatgaaaaataaatgaaatatacttctgtattatgatgtcaaatagagacaagagctaaaaagaaaaataatgtaaggcaagatgagtttatttccaattatgtggaagtgtaaaaatgcaggtgactttcatgaatcagcaagatctgattgtccttacagcacaatatgcttactgggagtgagggtgagaaaggggtgagaaaaatgacaaaaaaggaggcagaatatttgggtttcaagtcccatatgatcttttaagccctgttaagaagtttgggttttcttctgaagataagtcaggagccatggaaagattcttaggtaggggatatggtatggtctgtttttatgtagatcacttccatggcagtagagagaacaaattttgggtgatcaacttgggaggtaggggcctcagttaggaagctggttgcttgtggcctatcagttgagttgaaaggattattacacacaggctggcctgtatctggtaatctgagctttaactaggaggaatcctagcccaggtgggtcgctgtaaatggttaacccagttgtaattgatgtgcctactggccctgaattgaggggttgctcctatctccccacccgacttgcctggaatttctgcttctgataataccagaatagctcctgtcagacaaactgtatcacaggtaacaactgtgaactctgtacaaattattcaaaaccaatgactgaatactctggagagagaccaaaggcaggcaaagacagagaggcaatcaatgctcaggagaagaacataacaatgataagttttctgctttttacaggctttagccagagagcaggtccaagttagggctacactaggaaatgaaaacttggatcacaagcaacagtcttacaagcttgaagaaccagaaaaacaatttcaggagaccaaaccagacagaagatagccagagaatgatatccaaaatttcatgtataaattctgcccaaatctctgatgtaccttgaactgtgcatgcacagggtagactctaagcagtgatgcctaggctaaaagaacagaacgcagatttcagctgctgcccaccacaagaatgaaaaattttggatttcagttctaatcaagttaactgtctgcttaaaacaaaataatcaacaccctttgtgatttggttgaattttctgaattcagggtctccaaaatgtattactcgccatgtccaggattactagatatacaaagcaagtttactagatatacgaagaataaagaaaatataacacaaaaccaagagaaaagacttaataaaatccgatcctgaaataacccagatattagcagacaaggattttaaagcagatattttaaacatgatctaaaataagagaaatatgtatttcataaataaaaatgctaagtctcagtaaaaaaatagaaaccataaataataaccaaatgagaacctagaactgaaaaatacaacgcctgaaataagaaattaactggatgggcttaataactaggagatgacacaagaaaaagtcagtgaagtagaaaatagatcaatacagtcataaaatcttaaaaacagaaagaaaaaacagattggcttgtgaaaagatttcaaaaggaaaacagggaaaatttttttgaagtagcaatgcctaaaattctccacatttggtgaaaaacataaaggttggaaaattcaatcaaagaaaaccatactaagagccattatgattattgaaagtaaaccagatggctgggtgtggtggtccacacctgtaatcccagcactgtggaagactgaggcaggcagattgcttgagcctaggagttcaaggccagcctgggcaacatggcaaagccatgtctctaaaaaaattagccaagtgtggtggcgcatgcctgtagtcccagctactcaagaggctgtggcaggaggaccacttgagtctgggaggttgaggctgcagtgaccatgattgtggtatcacattccagcctgggtgacagagtgagaccctgtctcaaaaaagaaagaaagaaaaccagaaaacaaaaaattcttaaagcagccagaaacaatgtaacacatcatataataggtatagaataaaaacaatacaaacaattgctaacttcttatcagtaactatgaaagctagactacagtggatcaatgtcattaatgtgataaaagaaagcaaaactttcaagttatccttttatatccagtgaaaataaccttcaagaaagatggaaataatcttcaaggtaaaataaagaaatttgcaaataaatacaaactaagataatttattggcagtatgtccacactgcaatatacactaaaggaagtttttcagactgataggaatttgtactagatgcaaatggaatcttcaaaataaattcaactcatttacaccagaaatggtaaatatgtgggcaaaagactgcttaaattaaaaaaaaactttgtattatgatttatgaagcatgtagataatgacacatatgacaactagagcagaaaggatgacggaatcagtaaacagatttaattaattacgacatttgtatatcatacatgaagtggcacactattaattctaagtagactgtgaaaatgtaagaatgtttatagtagtccttagagcaataactaaaattataatgcaaagaagtatagctaaaaagcctttaaataaaatcagttttaaaaatctatacagttagccccaaataaagcaggactaaagctccaccttcctagtctctatatattccctgatgattttatttactacccttgattcaaccaccacctgtaagatgacctttttataggtcacattgacagagacgtccaacaggaattttatgactcataagcccccaaatctatctataacccacatctctctcctaagatccagataatatacctaacacagaggtaaaaatgggaggcccatggctagatatggccttttaaacaaaattagggtttttagaaaatcagatattttttatattgaaatgtatttttccaaaatctcttggaaaaaaagtgaagatctgaaatacaaatcctgaattcctgcaacagcaccattcgttgaagctaagtatgaccctactctttagtctgagaacttactgatcctataatctctatcactccttatgtatgacatctgttcactttactcagtgatgagtgctgataacaacttaagtgaatgaattctatgattacatctcctgttatgaacactacacaacttgtaatgtaatctgtgtatgcattagctttttatcaacccagtcatgctgacctgaactgagtttgaagtcaacaagatcccttttcataagggaagttcaatttatataggtctttccattttatagctggatgattttctgaatctcaatgcagacttacctagttatccctagtagatttcatttcactgttttcagctcttcatcatggacaactgagatattttggaatccccattcagtcacttaccgcagtgtctttccttcttgattctatgtcattcagacatctgacattatgcattctacattttccaatttaaatggaaccagtctttggtgacagagaaggtgatgcctaatcagtattatcttaaaataattcagcctaggaataagtcctctcagatgacattctgtcttcacctgaagccagatcagtgttcagagaacatgactttatgattgatatttctattaatgccttcttgttgaccctagtacttctgtcttttgacaaattttctaatgtcgggaacatgaagaacatgaattgatagtgtcacgaaaagaataataggcagaacatgagggaaaggtttgagatatgggttgggctctggttagtgttcagaattgggcggcctgcatcggactgtctgatccaaagtttcattgattcttgcccctgggaatgtgagaatctgggaacagtttgcaaatgttttcatacccctcccatcttcttcatcataaaggagctcattcatttagctttcccttctttttactggcaccttttgaaagaaaggcaagaattaatgtgcatttgggaaacaaaagttgccacgtacatatttagattgttaaactatattcagaaaaatgaatacttttggcatatatgcgtaaagatcttggatctatgcccttttacaatgggtagttacttgcttctcagctacacctctgattctggaatgaggaagaaagtcttcatagtttaagaaagtcttcatagtttaagagccaaggacagcagaaaacatggactgaatgccttgaatcagggaatatctcatgcagtagtgtgaaaagccaggcatcttttgccttcagttggtccaagaagctctgagagttaatgtatagcttccctgagttaggggtggtttctctggcctatatagaagatttttaaatgggctgctattgctccttccttctttacattcttaacttgggctgttgacattaacatgttgtaagagaaatcaacagaagccagtttagaggttttagaaattatgtctttgatgtctaagaaaagcatctcaaactatttaaaatattatattgtgtttttttattgagatataaaatctaccacagaaataagccactgaacccacaaaaggtgcgtcaatttctgtagagatgttttaggaagaatatgatcaaatgtaagacatgacaataaaacagcgtgtgcacaacacttctcatcttcaaagtattttacaagcattgccttgttaatgctcatggctcatcactgagatggcaggtgtgtgctatttatcccattccataggtgacaaacccaagaaaggtgaatgggtcacctgatggagtggtatcagatactgctgataccatgggcattggggttgacacagcattgagtgtccagatgtcccttctgtgaccaggaagattgtccagatgtcctcattgtgaccaggaagattgtccagatgtccttattgtgaccagggagagactgtcctgctttttgaaagcacccagtgccctagcttccctcttcagccttcttcttccactgttcatttctacttgggcttggaaatcccactcattcccagagctcaactattctccatgtgttggtactccaacatttaacttgctctagatctcaagtgcaagagctatatttccacctcttgattgtgttacttcctccgttctgtcagccttccccaaaagtcattttctccacaatttaactcattgtttctcgcagatcttgggatctatacctctgctaaaggtaccatcaaattccttgattcaaaatctgaggttatttgcagaatttctctcttcctcttctctcacagggatattgtctttgctctggccatgaccaagagtgtgatttcaggaaagtttcttaaccttcctgagcttctgttttctcttcagtttaataacaacaataacatgaggttactgtgagaattaaagcacagaagaacatctagcacatactactcaacaggtggtaactaattaccgctcaagtatcccaccctcaattttccttttctttactccagccagtagcctggttcagatcatctttccttctataacagacaatttttaatcacttgttgttatggactgactgctgtgtccccataaaattcctatgttggagctctctaactctcaatgtgactatttggagatgagtttttgtttttttttttttttttgagacagagtctcgctattccgcccaggccggactgcagtggcactatatcagctcactgcaagctctgcctcccgggttcatgccattctcctgcctcaacctcccgagtagctgggactacaggcgcccgccaccatgcccagctaatttttttttttttttgtatttttagtagagatggggttttaccatgttaaccaggatggtctcgatctcctgacctggtgatctgcctgcctcggcctcccaaagtactgggattacaggcatgagccaccgtgcccagttgggatgaggtttttaaggaagtaattaaggttaaaggaggtcataaggatgagcaataatccaatagcgtcattacaagaaaaggaagagatgccagagatgatctctctctgcatgcatgcactgaggaaaagccaagtgagcaccaatgagaaggcagccgtctgataaccaggaagagagcccccaccagatcctgcccatgctgccaccctgatcttggatttccagcctccaaaattgtgagaaacaaatgtctgctgtttaagccactttgtcagtggtatactgttatggcagcctgagaagactaagacacttctaaataggtgtctcttcctttataattgcctcttcaacagcactgtagtcagctatgcagtgtccattcctccattcttcctaactgaaacaacttttgcagtagcaaatgtctcattaaaaataaacaagccgagcatggtggctcactcctgtaatcccagcactttggcagggtgaggtgggtgagtcacctgaggtcaggagttcaagacaagcctggtcaacgtagtgaaaccacgtctctactaaaactacaaaaattagctgggcatggtggtgcgtgcctgtgatcccagctactcaggaggctgaggcgggagaattgcttgaacctgggaggcagtggttgcagtgagctgagatcgcgccactgcactccagcctgggagacacagtcagactctatctcaaacataaataaataaataaacacttccccacaattccttgcattctcatccagtctagccaatgattttaagcaggcatctgggggaaggcatgtctgttaaaactattgcttttctcataacaagtgtgatattccattaacatacgagtttgaactttgcccttcccccttcttgcctgaaactctgatgcgctgttgggaggtagagcagccctctcgaaacctgaggactgaagcatccactaagtgaacaaggtggactcaagtccttgatattttctctgactgttgtgcccatcctagaatgccaaccttgacttcttgtttcatttgaaaaataaactatttggctttagtggtgttctgttggatgcagatattacaatcttaactgggagagcttccaaactgttctccatgttaccaccagaaaaaaaaaaaaaaaggcaagtgacatctccattaggtcatgctcctacccaaacgcttccactggcatctcattgtatatgaaataaagtccaaaccctgaagacaacatgagaattacttgccatcagcctctctcctttcctgccttgcctcctccaccccagcttccattctctgctataccatctttgaaaaaccacctgttcaccccagacacacccagcacctcctcaccttcttgcctttgctctctgcctataaagcctccctacatccatctgccaagacatgacttgttttgcaagtgccagctcaaatgtagccttcccctgaggcagcagtgtttcttcttataaggaatctcttgcatcttggggcttccatggtactttgcttccagcaaaatcccagactctttcacattctgctgagagttagtatgaatgacattgccgactgttgaggcagcgtggttgtgagtcagagttcaggagcctccatgcccagcctggatcacccctaacagcatgaggggcttagtactaattcctcgaaggctctttctctctttttagaaactctgtaaattggggtaatgatggtacctactgcctaacaagcattgttgcaataattaaaagaaaatatgcgtgtaaagtgcttacaaagtgactgctacatagcaacttaattttttttatcttctttcctatctagataagaatttttttggtagcagttactgccttatctgtctctctatagccgctcaggctgtagcatgatgctgagtatatgggagccacacaataactatttactgggttaaaccagtcaatattttaaaattcccattcaaattctgttttgcacaatgatgcatggaattagacactaaaatattcaagctacacttaggtgtcattttttatttttattttttgagtggagttttgctctttttgcccaggctggagtgcaatggcgccatcttggctcactgcaacctccgcctcccgggttcaagtgattctcctgcctcagcctcctgagtagctgggattgcaggcactcaccaccacagctggctaattttgtatttttagtagacacagggtttcaccatgttggccgggctggtttcaaactccttacctcaggtgatctgcccaccttggcctcccaaagtgctgggattacaggcatgagccaccacgcccggcctatgtgtcttcaagatctttgaacttacatgaatttgtgaagttctcattagaactcctttatccttttctccatatgctctttttatctgttaatttatttattttttttgttaacccatgcattattttgtttgtttcttaaagcaaatctttgcaataggtacctaaagaagtaaaccactgtatagtcaatagagatttcaggtgctgagagatggacttgtcctaagggggttagaggcaacaggggtttatgccccatggtaaggattccctgtctactgttcttttcattaaacaaagtcccatggcaagaataacccctccaagcctacaagccccaggagatattcccaacaatgaaaacatgctcaaggcattttgggtgatgaggtacaatcaggaaattgacaatgctgggtcaatgcagtgagtcttagctatgggatcagatggacttgggttcgattcgcccaggggttggtacactgcctctgtgcaccgatatgtgaaatggggatcttgataatcatgtgatagattgtcttaaaggtcaaagtaagcaatatatgtgatgtacatcacattgcattgtggatgcttggtaaattttatttccccaccccttcacaagcttgataattagcacacgttcatccaaaagaaagagacagagatttcttataaaaaattgagtcacattattatggaggctggtaagtccaaaatctgcaaaatgggcccattggagattcaagaaaaccgattgcacagaggaagcctgaaggtcatctacaggaaaattccctgttgctcagggaggctggtctgtttcttttattcagaccttcaactgattggatgaggcccaccaaattacagagggcaatttgcctcacttaaagttcagcaatgtaaatgttaatctcatcccaagacaccttccatgttgacacataaaattaacacaaatactatcctaaaaatgcttggtgcttaatgaggccaagaaaataatttcaatttttttagtaagttgctattacttgtaaccaattacttcttcagaatatacatcaggtgatgcctttctgtagatggattagaaccaaaattgttgttcacattactactgtgggttctgataaggaataagcatcatgttacaaaatttgagatatttgtgactatctgtagagggttctagggaaaccatgagcctgcttgatgcctttgtgcaaattcttttttttggcaaatgctggcaagggcagtacaggctggattttttccttcagccatggtacatggacagctggtgacctcagaccattttgtatggcttgtgtattccaccacaccatgtatatgaactgtggccttagaataccttttagtctgaatcaggtcatgttctagtcaagttgcaacttagtgatgcatcatttatgtcaaaaaaatatgtcagctgtactgattcacaagccgagcataataaatgagcataataaacgaatgtaagtaaaatggaacctatccctgacgttgggcaggtctttgccctgtttttcaatgcatcctgccacctttctcaggaacccagtgtaccgtcttcaccaaaacaccaggacatctcattattccttgtgtcaaagcaaaatctcttacaggaaatttaagtaaattcatcattttattctcttatgagtgaaaggaaacaaaatgctttttttccacatcatgactacactgtaagttttaagatgtgaagtaaacagcaatttgtgcttgagcctagatgtagaacattttctccattggacatccttcagcctcttgacctttgaaataaatatcagagacagaacttccccaccctctcacaaccatggtcagggtgtgcatgtgaggaaaggggagagttctagcagcaagagccaaaccagtcctggagatcacacggtcagccctcactgtacccatgcaaaccaccaccagtagaaataatacaaccatacctacctctcacctgtacagcacttcaattttcaataagcttaactcacactgtcttccataaagttcttgaacacttatacacctatacaatcaaacaaagcaaaacatacccaagcatgaggtagtcatcattcacattttagaaatatgaggactgtggctaaaataaaaaggggattaaaagagaattttagaccaatatccctgatgaacattgaggcaaaaatcctcaataaaatactggcaaaccgaatccagcagcacatcaaaaagcttatccaccatgatcaagtgggcttcatccctgggatgcaaggctggttcaacatatgcaaatcaataaacgtaatccagcatataaacagaaccaaagaccaaaaccacatgattatctcaatagatgcagaaaaggcctttgacaaaattcaacagcccttcatgctaaaaactctcaataaattaggtgttgatgggacatatctcaaaataataagagctatttatgacaaacccacagccaatgtcatactgaatgggcaaaaactggaagcattccctttgaaaactggcacaagacagggatgccctctctcaccactcctattcaacatagtgttggaagctctggccagggcaatcaggcaggagaaagaaataaagggtattcaattaggaaaagaggaagtcaaattgtccctgtttgcagatgacatgattgtgtattcagaaaaccccattgtctcagcccaaaatctccttaagctgataagcaacttcagcaaagtctcaggatacaaaatcaatgtgcaaaaatcacaagcattcttatataccaataacagacaaacagagagccaaatcatgagtgaactcccattcacaactgcttcaaagagaataaaatacctaggaatccaacttacaagggatgtgaaggacctcttcaaggagaactacaaaccactgctcaatgaaataaaagaggatactaacaaatggaagaacattccatgctcatggataggaaaaatcaatatcgtgaaaatggccatactgcccaaggtaatttatagattcaatgccatccccatcaacctgccaatgactttcttcacagaattggaaagaaactactttaaagttcatacggaatgaaaaaagagcccacattgccaagtcaatcctaagccaaaagaacaaagctggaggcatcacgctatctgacttcaaactatactacaaggctacagtaaccaaaacagcatggtactggtaccaaaacagagatatagaccaatggaacagaacagagccctcagaaataataccacacatctacaaccaactgatctttgacaaacctgacaaaaacaagaaatggggaaaggatttcctatttaataaatggtgctgggaaaactggctagccatatgtagaaagctgaaactggattccttccttacaccttacacaaaaattaattcaagacggattaaagacttaaatgtcagacctaaaacctagaagaaaacctaggcaatgtcattcaggacataggcatgggcaaggacttcatgtctaaaacaccaaaagcaagggcaacaaaagccaaaattgacaaatgggatctaattaaactaaagagcttctgcacagcaaaagaaagtaccatcagagtgatcaagcaacctaccgaatgggaaaatgttttgcaatctactcatctgacaaagggctaatatccagaatctacaaagaactcaaacaaatttacaagaaaaaaaaaaaaaaccccatcaacaagtgggcgaaggatatgaacagatacttctcaaaagaagacatttatgcagccaacagacacatgtaaaaatgctcatcatcactggccatcagagaaatgcaaatcaaaaccacaatgagataccatctcacaccagttagaagggcgatcattaaaaagtcaggtaacaacaggtgtggagaggatgtggagaaacaggaacacttttacactgttggtgggactgtaaactagttaaaccattgtggaagacagtgtggcaattcctcaaggatctagaactagaaataccatttgacccagccatcccattacagggtatatacccaaaggattataaatcatgctgcttgctataaagacacatgcacatgtatgtttactgcagcactattcacaatagcaaagacttggaaccaacctaaatgtccagcaatgatagactggattaagaaaatgtggcacatatacaccatggaatactatgcagccataaaaaaggatgagttcatgtcctttgtagggacatggatgaagctggaaaccatcattctcagcaaactatcgcaaggacaaaaaaccaaacactgcatgttctcactcataggtaggaattgaacaatgagaacacctggacacaggaaggggaatatcacacacgggggcctgtcatggggtggggggaggggggatggatagcattaggagagatacctcatgtaagtgacgagttaatgggtgcagcacaccaacatggcacatgtatacatatgtaacaaacctgcacgttgtgcacatgtaccctagaacttaaagtataataaaaaataaataaataaaaatttttaaagaggaagatttagtaatttgcccacgatcacatcacaaatacgtggcagaactgggtttgaaaacagatcctcttccatcttgagcaatctttggtccagatttcacagcagccacaagaggagtggggtgggactgcaccctcttttcttattcacacctcctcctccattgaggctgcaacatagttcattttcgcctgaccacccccagatgcaatgggtttgcaggaaagaaacacatcattcaatcagctgccatttctcaaagccatctggaaaggctgtgctggattgcactgaggtgaaaagcaaagcagttctctccgattccttcatcctgcatgggtccaggcacttctgtgcctcctttcctttcacctaaaatccttcctggattcacaagaaatgtgtaatccacgatggtccctcgctttgtctcacacactaacatctacatatttctgtggcatctcatgtttatttagtctgatgataatttttcattctcttttttcttttgcttggttctgtttgcctgatgtttccatgccttgcctatatgacttatggtgaaactctccagacgtaattatttggtgtaaatataatggctgaaaattaatatttatagcatttaaggagtgttgtatttttgttgttaatgatgacgttgtttcaaaatttcaagactctctttggataattgatgtattcatatttaacatgcaataatattgcacaagtgtattggaaaaagcaagtgttgaaattgttggaccagctctttttcatttgacacctactctttaccctattgaacttcaccttctttgtctctgagcacttctaaactgcagaagacacttgcaactctaaattcacgttgactgttccactaaagcaacagaagtgatatcaagtagattcatatattttaaaggccaaagagtattggttcaaaaattgctcctttttaaaatatactccatatggccatgggtttctcaagtagaccacagtttgatttaagaacatttttccctcttgagaaaaacaaaaaaccacactaacatatctagaacatttttcctgccctctctttgcacaataccccacctagtattatgagggattgtaggcctaactaaatacccccaacttaccttaagtacacaccctccgaactccccaaaccagttaggccttattgaaagagttttgccattcaaacgccttcccagttgtcctgtcttagccacacccacaaaacaaatgcaactgctcactctagagccagccggtgggcaaatagagctcagcttccagcctctcccaggccaggcatacatttggcctgaagctgttttgctgttttgtacaaatggaagccactcaactgcttttacaccttattttaatgccttattatttcaaagggatctctgttcttattgacaataattactgttaactcccccatcaagttcaaaggtttctgtgattatgaaacttcttctaaagactagccgattaatccaacttgttattaaattagaactatattcttgacctgttttaatggaggttttattactgctttcctaataagcttaactatcaccttgaaatcacatcaatatttctctaatctttattatctctattaggagtccatgggctcactcgctattagataggcatttaatgtctactataatctggccctaaattatcaaattcatttcaactccctgattcccccacctccgcccacctggtcccccctcctcctcaatgcacttgcatcttcttgtccaaccaaatacagagctttatactttgatgtctgaacacacgatatgtacatatatcagcctctttcctttaccctgcaagcaatggcctctcccttcctttctctgtcctcttcctacccagctcctccagcctgccttgttcactctgctcttgctcactctgccaaggccataggatcttgaaaacgcctatagcctctcccacccatgtggcactagtacacagagtttagcactaatttaagacttggtgtttatctctagctcctaagttcacagctagaaaacaaacttcaaggaagtggagtttgctcctatgttattgtggtttcaaactttgacaaaggaaagaatccctagacctggaatctgaagagttggcaggcagtaaatagttctagcgatttatcagctgtatggtcctgcatttgccacttacccttctcttggcctcagtgtctcattcataaattggagaaaatgccttttccgactacctgactgcattgctgcaaggagcagacgtgttgctcaggcagaaaaccttggagttgctttggctctccactatcttctactctcaaatccaaatcatcagtgaattctgctggctcttccaccatagcctatcttggctgaaaccacttctcgccaccttcaatttaccccctggccctcaccctatcccttctcaattggattgttgaaataccctcctaactcatcttcctgcttctacccttgagtggtgctctctgcaatctctttcatgtgatgtttcaaagccagtgtcagaatatcactgctctgctcagaactctctagcaccctatggtctagctcgggataaagtgcaaagtcctgacagggtgcctctcagcccacctccttctgctctccctctcaaccaccactctagcgattgcctcctcttgcatctggaacatcagaagggccgagttctgacttacttttgcttggcctggcatgaacctccccgagtagctgctcgatttcctttcagcaccactctctgtgttttcagcccactttgacaggagactctctgaatggccccttgaaaagcaccttaacccacctatccccgaacatgctttcttcctcttcagagttcttatcaccaatgacataacatgtatttatgtgcttatgtctgtggtttctgtctgtctctgctagaacgttagcctcatgagagcagatgccttgtttggtttactgccatatccccagcatgagagttcctggaacatagtaggtgctcaataaatacctataaaataaatgaacaagcgaatgaatgaatataatggagtttatttgaaactctacagttttaatccactgttctctaccttggttgtccattaagatccactgaggaattttaaagaatactgatgttcagaacacaccctaaaccatttaaatcaaaatctattggactgaagcccaggtgttggtacttttaaaaaactccctagatgtttccaatgtataaccaaggttgagacctattgctctcgagcatataaaacagtatttgtttctaattggatttgcgttcccagctagcaccttgctagctaagtgccttgtacatttcaaatacttcttgattggttgtttttaaaaatgaccacttttaatgcatagaatagtttgtgcactgggaaaaaaaacctcaatactattttacttggttagatttagatcggtatcttatttggggaatggaaccacaagaattgagtagctattctctgcaaggtactctgccagttactaaagatacaaatcccatttaataccatgtaatgacgataatatttttcatatggtaaaccaatgtagtttttttattccttgcaaatcattttgccctgtggctccccacagattgaatcagaggcatttattgcttcaggggaaggcagatactgcctaaaacaaagacaactttgttcagctttgaggagcagactagatttgttaagctcagacgagacaacagtcttgaaagctaagcttgtggagagagaaaagaatttgataaatactcaaagcttccctttaatcataaatgagaaaacttgtgggagtgacgagtaagttgtcaaacttttttttatttcaggacacctttgcaatattaagaattattaaggccccagataacttttgttggtttacaggggttatatatttatcagtagttactatatttataaattaaaattgagacatgtaaaaatatttattaattcattcttataagatcaatgttaaatccattacatgttaacttaagggatacatttctgggaaataattacattgtccaaaacaatatgtaaggagtgactttttaaaaaaaatattttttggaaatctcttcaatgtctagtttgatagaaagttaaatttttatatctgcatctgcattcagtctgtttcaatctgctgttttggttgaagtacatgaagaaaatccagcttcacacacatatttattaatagttcaaaaatgcaaggtatattaatcgccatttcagattattgtggaattattctttgaaaaaaatcctacttcttaatgtttagttgccatatggaatttcaaactatagcaatgaattttcatactttgatatattaaacttaatttatccatctcatgctttgaatagatcttttactcatgtatgtttttgtaacattatgtattggccacttggaaactatcagttcactaagttatgtagatctttcaaatgttgacacatttcattactcaatattttaaaaaatcacatttgttaatatcactatccatgtcatcagaaatgtctgtaagcacttggaagtaagttcacaggggtggaaacaaatttctaaaattcttatttttgttgaaaattcaaattttatcattagcaacaaatgttctcagctgtttttcttgaagtgacaggcttgctttaatcattttcaagaaaatatctccataacacctacgtttgaataactatagtttgtacgtcagttatttttcaaataagagtggtgttttatgaaaaagaggctagttcagaatactcacaacttgcttctgcttcttcagacaaccactgtggtccagtatgtagcagaggtggtttatgcatacttcctgtctggttatataaaatattaaaaagatgtgtactcaagggatgagatttaatagcattaatttttttattgcttcatggaggacataatttaatgaaactgattttttttaactgtacatggatggcggaaaaaatgcagtgactactagttgtgtttaacagcactgtcttttttttttttttttttttgagacagagtctccctctgtcacctaggttgaagtgtagtggtgcaacctcagctcactgcaacatccgcctcccggattcaagtgattctcatgcctcagactcctgagtagctgggactacagacatgcaccatcacgcccggctaatttttgtatttttagtagagacggggtttcgccatgttggccaggctggtcttgaattcctgacccaagtgatctgcccgcctcggcctcccaaagtactgggattacaggcgtgagtcactgagcctggcctcataccactgtcttgattgttgctatggtgctcataattttacacaccaatatttttacaacatcaatgaagaatgtcgacacattttttaaaagcaaataatgtctttgtatttatcaaaatcattttgtgcctcatagacacccctgctagggtctcggggatgcccagcagttgacatgtcacactttaaagactcctgcactagactaatcatagaggatgtgatataaaggaagccccatttcttaaaggtttcaggaagaagggaagcttctggtcccttaagcatggaatgaaaagtggagaggatataactggcagggtggagacatgggcagaggcatggagtttgaaacaaccagaaagatttgagggcatggctgggtgcagtggatcatgccagtaatcccagcactttgggaggctgaagtgggaggattgcttgagcccaggagtttgagatcagctgggtaacatagtgagacacccatttctacgacaaataaaaataaaaattagcatggtgtcatggcatacacttgtagttccagctacttgggaggctaaggtgagacggttgcttgagcccaggagtttgagactgctgtgagctattatcatgccactgcactccaggctgggttgacttatcttttgtgtaaaaaaaataagaaaagatttgagaaaagttccccaaggaaggtttgtttctcacttcccagggtatagcccagaggaacattcacctcctgagaatagcctgatattcagtatggcatgggtcccacatggtgcttcccaagatgcagactgaaaatgaccggtacatgacaccatacttaatagtgaaagactgaattattttcttctaagattggaaacaaggaaaggacatctactctcaccactctgattcaacataatactaaaagttctaggcactgcaataaggcaaggaaaattaataaaatgtatgcaaattggaaaggaagaaataaaaactgtccctatttgccgataacataaatgtctgaatagaaaagcccaatgaatctatcaaataacaacaaaaatttcctagaagtgaattaaacaaagttgccagatacctaattaatagacaaaaatcacttgtatttatatctactaagaatggacatgtgaaaactgaacttaaaaacagtactatttataatcatgccagagaaatttaaatattttggttaaataaacttaacaaaacatgtataagatctatatgctaaaaattacaagatgctgataaaggaaatcaaacaatgcttaaattaatagagaggcataccatgctcatggattggaagagtcaacatagtaaatacatcagttctttccagcttggcctatagattagataaaacttctatcaaaatcccagcaagatttctgtaggcacagataagcttatttcaaactttatatggaaaggcactagccctagaatagcaaaaacaatcttgaccaaaaaatgaataaagtgcaaataattagtacttgctattaatagttattaattctatatagctgtaatatcaagacagtgaggaatagacagtggaacagaacagagagcctagaaataaacctacacaaatacgtgcaactgattttttttctcctagaaagtaaattccagttgtgataaagtatgcacaaaagaactaagaacacagtgaaatacaataattttaattctgaccatgagtgatttttaaaaattaagtacaagtccaggcatggtggctcaagcctgtaatcccagcactttgagaggctaaggcaggcagatcacgaggtcaggagatcaagaccatcctggctaacatggtgaaaccccatctctactaaaaatacaaaaaattagccaggcatggtggcaggcacctgtagtcccagctactcaggaggctgaggcaggagaatcacttgaacccgggaggtggtggttgcaatgagccaagattgtgccactgcactccagcctgggtgacagagcgaggctctgtctaaaacaacaacaacaacaacaacaacaacaacaacaatttaagtgtaactcacatacccccaaaattcaccctttaaagtatgcaattcagcagcttttattatattcataaacttttccattgctaccactacctaattccaggacacttccatcaccccaaaaagaaaccctgtatccattatcaatcacacttcatttcctcctcacccaactcgcaaccattaatacagttcctttccatagagtcaactatcctgggcatttcatataaatggaatcatacaataagtggctttttgtgtctggcttatttcacaggccagaatgaacccaggagacagcccctagacccaatgtggttctagcacctacaacttccaccttcaaaccaggatgatgtataaattctgtttatatttgttttgatgcccctggaaagaaatcccaaattgacttaactcaaatcctcaaaagactacccatttatgcaaaagtgactgagttaatctgaaagagtgttttaaaccagttaaaactaagatactcatactgaccagtttgacttttcttccccttttataggggaacacagaagctccaaaatgagatcagttatggaaaataaggaacattctaattttttttttttaggatctgagtcatagcatctaggttcccatcttctcagctcctaacaatcctagtttcaagatgaggaaactgaggctcagaaacattgagagactgcccaatgtcacatgtaaattcaagtctgtctgctttcaaatccattttttaagcaaagactgacttttgataataagattaatatcaaagctagatgcttttcataaactcttactaagaagggtcatatactgtaacatctcacccaaatcaagctctacaatttttgagaacttataaagcaaagcaaaacaaaacagaattttctaattttcaggaactcctttatataagctccccaaccttattactattcaaaatttaaaacattttttttttttaaaaaaggatagcagtaaaaaaattacaaccagtagtcaattagtatattacttacatgctgcttaatactgggtggtatttattgaacatcgactcggcgtctatccctaggctaagcaatttccatgcatcatctcattccagtttcatgaccaacttttgaggaaggctgagtagcagaacccaggacacaccctgagtcagtaacagagccaacttcaagcccctctggtctctggagcctacactctttttattgtttgtttgttttttgagatggagtcttgttctgtcgcccaggctggagtgcaatggtgcgacctcggctcactgcaacctccgtcccccaggttcaagagattctcctgcctcagcctcccgagtagctgggattacaggtgtgtgtcaccatgcccagctaatttttatttttagtagagatggggtttcactatgttgaacaggctggtcttgaactcctgacctcaggtgatccacccgcctcggcctcccaaagtgctgggattacaggcgtgagccatcatgcccggcctatttattcttaagttcctaaaaaggtagtacatgaaagagagaaagtgtgtgtgtctctatgtgtgtatacacatacaaacatgcaggtgcctgctgaagtttcctcaaagcactgacatattactttattttgaaaagataatttttgtgattaactgcccttggataaattttagcgatagaacttttaatatgtggattatgaaaaaaatttaagccttgtttcttttgagatttaaactatactacaaccaaatgtaagcgacacagtgcgttaaaggttgaattgtatgttcacaaaaaagataggtggaagtacaaaccccccagtaccttaaaatgtgattatatttggaaatagggtcttcacaaatgtaatctagttaagatgaggtgtttgaagtttaatcaaaatatgactgatgtccttataagaagaggaaaatgcaaaaatgccacgtgacggtagaggctgagagtggggtgaggcagctgcaagtcaaggaatgccagagattgacaacccctgccaggagctggaagaggaaaggaaggattctatccagaatttcagagggggcatgaccctgctgacaccttgatctagaaattctggtctctagaactgcaagagaataaatacatttttgttattttaagccactcagattgtggtattctgttatggcagacctaggaaactgacacccagggctttagacaggaaggggtgggtgctgtgggaagatgatcacgtcctagagaaaacgagaagaggaataacaatgacatggaaaagaggtgacgtgttctggaaaaagaggaagttttgatgtacctactttcttgttttgattttcttagaattcaaagtaagtatgcagaaaaagattcatgtgaattggatattgcagacataatcaaggaaagccagctacaagtcttgctgcacttaagtgtaaggtttaatcaaaatggatggtagatttcacaaaacagaaccaaccatttatcatagttactaaaacgaatatcacataatgtgtacgtgtgtgtgtgtgtgtgtgtgtgtgtgtgtgtgtgtgtgtgtaaaatttagtgcactcaatagcattgagcctcattaaaaaaagaacatgttggccgggtggcgtggctcacgcctgtaatctcagcactttgggaggccgaggtgggcagatcatttgaggccaggaatttgagaccagcctagccaacatggagaaaccctgtctctactaaaaaatacaaaaattagccgggcatgctggcatgaacctgtaatctcagctactcgggaggctgaggcacgagaatcacttgaacctcggaggaggaggttgcagggagccgggattgcaccactgcactccagcctgagtgacagagcagcctatattaaaaaaaaaaaagaaagaaagagaaagaaagaaagaaaaagaaagaaaagaaaagaacatgttttaggaaatatcttactgatttttttctacttcagatctcacatgttgacaatgttgcttccaattctggtgtcttaataaaacaacccttagagttctttacgtcagaaatgtatgatgatcatagaagaattagataattattactggatataccacaagaggaaacatgtattattctccatacagatttacatacactgatctataaagggtatggggcaggttccgaagtgagtcatcactttgtcccaggaaggaatgggagagacgccttatcagggtggctcatgggacactcggtgaaggcttttctggggcctctgctgcttttcccattttgtccttgaactggacaattggcctgcacccacagacctgcttcctgtcaggaatttgttaccaggccttgcctttgcttcctcccaagctcaaagactcttcagttattttaaccccggaaagactggagcaaactctgcctgtcctctctgaggagctggtgttgtttcaccagctatgacaatgcaggggtatttttgtattcccatttgtgggagatagtcttttttattttacttgtgataaaactgtcagcaaattctgccttcatttctctggttcggtgcactcccttgggaattaacctgatggcaagttgtagccatgccatcaaataactgacacaaaatacatttcttaaatgggcatgttaatacctcagaaacttgagtaaacgtccaatgtggccattttttaaagttgtcctcttttattttaggaatgaggaactcattcacactagcattgttagagggatgggtagtggtgagctacatccagagtgataaggaggtcccaggaaggtcccaggacactcccagaaggagcacagggaggtttgtcccagttccccttcagatgacacagattcatgctgccacgatggaatgaccacacttgtcctcctctgctttagcctcatttcctctctccctctgtccatgcacgtctgtaggtgagcacttccattccgacggatgcacatgccatcttaatggtgatgcttctctgccaagctcctggctaatgcatgcaattcctcctccacttggaacacagatgtctcaaagtcaaaatgtccaaagcagccttattgcttcttccccaacccccatctctatcccttcttgattttccacattttagaaaattgggcaatgggcgccctcgccaatccagccagaccatcaccacctgctggattcaccaacaggtgctgttgatgccatgtgaagactccagttcaaatctgtcacttcccctgccctgcctgggaccctgtccctgccccctcctctctctgaacccttagagtctgctatccatgctccaccctgcagacagagtggctgcttctccagctgtaagtgagctcgtttcactttcctgctcaaagccctccccgtggtttctcaaggcacttggagtaaaccctaaacttcttactacagcttccaaggccctgaatgaccctatcccggccaacttctctggctccgtgccaggccgcatctagctcattaatttggagccacgtttctcatctcagagctcattcccacctcagggtctttgccctgcagtgcccttggactgggctgctctccctgtgatcttcccaaggcaaactcctttgaatcccttaggtctcagcagaaacggcgcccccacaaagaaccgcatagaccagtctacctaaagcaggccattgctccacagtgtccccaattcagccttactatcgtatccttcagaaaacacaatgtatgagtatttttgtctattttatttttattgcagtataacataatacaataaggtgacttaattttaatgtggagcttgatgaattgtgacatatctaaacccgtgtaaccaccacccagatcaagaagtggaacatgactacaaacccagaagattgccctacatcctttccaagttggtcctcagagtgccttcttccctatttccagagataagcactattctgacttctctcaccattgattagttgtgcttgttcttgaactttatagaaatgtaatcacatagcaaatactctgttgtgtgtgtcttcttttactgagcagaatgctttgagattcatcatgtagttatgtgtaatttgtccttttttatgactgtataacattcagctctatgattataacttatttattcatccttttgctgatacttaaactgttttcaatttttagctattataaatgaaactgctaaagacatcctgcacgagccatttggtggacgtaagaatgcacctctggctcatgcctgtaatcccagcactttgggaggccgaggcaggcagatcacgaggtcaggagatcgagaccatcctagctaacacggtgaaacacctgtctctactaaaaatataaaaaaattagccgggcgtggtggcaggcggctgtagtcccagctactcgggaggctgaggcaggagaatggctcgggaacccaggaggaggagcttgccgtgagccgagattgcgccactgcactccagcctgggtgacagagcgaagactctgtctcaaaaaaaaaaaaaaaaaaaaaaaaaaaaaaatagaatgcacctctgttgttgggtatataccagacagggaattctgggtctgagggcagacatatgttttaacagattatagcattagtcttagttttaattttgatttgtgtcttccctagtggaattcatctctgtgaaggctagaacctgtttaccttgtctacctttataccctaacacccagtgcagtgtctagcacattttaagcactcagttaatatttgttgaaataataggtatatcattctgttcattccatttctttcttttcttttttgagatggagtttcactcttgttgcccagggtggagttcagtggcatgatctcgactcactgcaacctccacctcctgggttcgagtgattctcctgtgttagcctcccaagtagctgggattacaggcatgcaccaccacgcctggctaattttgtatttttagtagagacagggtttcaccatgttggtcagtctggtgttgtactcctgacctcagctgatccaccacctcggcctcccaaagtgctcattccatctgtgatcgttcatttcagttcgtgcctctccagcttgtcatatcctttcatggtacattttaagcatcagttttcgttgttaaatgccgtattctcttggtgctactgcaaattccagacagaacctgaggaatcagcccagccttttcagccagccccacactgttgtgagcagactcaacactggcccccttgggcttggggcccccccaggcctatcaagtgtgtctgaggagtagactggcatgcccaacccatgctcgcctctgtgcagcatctcataggattcaactgtggctggaattttaacattcatcctgactggcacatgtatgtacttggcacaatgcctgacataaaattatactcagcaaacaaactactatcatgtatttccattattaccaaaacttcaactacttctcctactgatatcatagtccataattggccttcaccaggttagacaatcagatattccttaaaaagccaaccgcagttcgggaacatcagtctctaatttctacatgtccaatgttgtttgggatctgtagattacaaaacacaaaagtcttaataaaaggaaactgttagccactttatgcagtaaacaagaatgcatcatctgaggtacatacattccaatttcttttaggaaaggggtagagtcatttatgttaaaactcaacatgttatatttaaatatccatctgtaatggacagactaaaagtggccctcctgacccccacctcctagtattcacaccctactgtgatctcctcttcagtgtgagcagcacctgtgaattgctgctaaataatagaatatggcaaaaagacagggtgtatgggattaggtgattatattacatacaactgcatcatctggctgggtgcggtggctcacacctgtaatccaagcactttggggggctgagatgtgtggatcacaaggtcaagagatcgagaccatcctggccaacatggtgaaaccccgtctgtattaaaaatacaaaaattagctgggtgcagtgacacacacctgtagtcccagctacccgggaggctgaggcaggagaatcacttgaacctgggaggcagaggttgtagtgagacgagactgcaccactgcactccagcctgggcagcagaatgagactctgtctcaaaaacaaacaaacaaacaaacaaaacaaaacaaaactgtatcatccatcttcctggagtctctctctcccttgctggctttgaggacgtgagtagctatgttggggaaccccacacagcaaggaattaggaacagcatctagggagtaagggcagtctccagcctgcaagggcctccagctgacacccccaacaaaataagccctttagtcctaaaaccacaaggaactaaattctgccaacaactacacgagcttggaaatgtatccttccccaatcaagcctcagatgagaccacagctctagccagcaccttcattgcagccttgtgagtccttgagactgtgaacccaactaaactgtgtccagacttctgacctacaaaaactgtagatgataaatgtgtgttgttttcagctactatgtttgtggtgatactgcttcaccacaatagatagctaatacatcattcatttttgtcattcatttagttagcatctattaagagcatacttgctcataagatagttctatctttattaagaaacctgtatgctgtttttcataatagctgtactaatttacattctcaccaacagtgcacaagggttcccttttctccacatcctctacaacacttgtttttttttttttttgtctttttgataatagccatcctaacagatgtgaggtgatatctcattgtagttttgatctgcatttttctgatgattagtgatattgagtagtttttcctatacctgttggtcatttgtgtgttttatttggagaaatgcctattaaggtattttgcccatttttaaataagattttttttttttttttgctattgagttgtttgagtttcttatatattctggatattcaccccttgtcatatgtatagtttgcaaatattttctcccattttgtaggttgtttctatactttgttgattgttttctttgctgtgcagaagctctttagtttgatccagtaatcctgttagtgggtatatatctgaagaaaataaaatctgtatgtcaaagagatatcttcactcccatgtttgttgcggcactattcataatagccaagatatggaattaacttcagtgttcaataacagacaaatggaaaaagaaaatgtgatgtatatatacaacggaatactattcagccataaaaaagaataaaatcctgtcattcacaacaacatggatgaatctgaatgaaattaagtgaaataagccagtgacagaaggacaaatattacatgttcccatttatagcagaatgttaaaaagttgatctcatagaagtagtgaatagaacagtggttcctggcagctgaagagggtgggaagaagaagagaaaggagagagataggtcagtggataaaaagtcacaattaggaaggaagaataagtgctgatgttctgttgcacagtagggtgaccatagtcaacaataaggtattacacatctcaaaatagctagaagagagaattttgtatgttcctaccacagagaaatggtaaatgtttgaggtgatggacacgctaattatcctgatttgatcattacacaaggtatacgtatatcaaaacatcacagtgtagcccacaaatatgcacaattaagcgtcaactaaaaataaaaataaaataaaaaaggaatgactaaaatataataataaccctaaaaagcatactgtaggccaagcacaatattggacaccagatataggacatcatttagttattattcaatcaaatgtgaccagcctgaaagccattccaattctatatgcagttgttttataaaccccaaaacaatgatacaaccacaatctgagataacacaacactggcactactgaccttacttagtgttttcccccattatttccctttaggcaagattaaatgctcatggcaaaacaaacttatttggtatttcacaatgaaattatcatattttaataaaattattgaattatcaaaatttctgcaagaaatttgaaaactgtcacattacagaagaacagggatagggaccaaccaagctggctagacatatacaactacagcaaactatgttgttgttcgtcagttttggggtcaaggtagcatgtaatcttccagagagctaggttggagatacgaaaaatatttttaatgatacaaactattccagatatgaatatgaaattagtatttctggcaatatgcgttgtatacggcggttaaatgattctgcatttctgtggctaaataattggagctgtcttggttttaagcaactgtggattttgtggttaaattacgttgtctagttttaacaactctgtgtgtatatatatgtgtttgtatatctgtaggtgatttttacacaagttataggtcattgtaactaagccacagaaacctatgatactaccctgtgtgtggaatgacctcacaagtcactccaatttctgtttttaatgttgtcctgcaaatcataaccattcatagggaatttgaaattgcttccaagtctcatcagcagagagtgaaagccttttaattttttagagatgtcttccatgatgacaattgtagagtagaattcccctcctccacagaaagaataaaatttaactcttctacatgaactctgatttttttaatgcattaataagaatatatattttctagaaaactgagaagtgcagttccgttatcctaaacattatttttccaaatccaaaactttttatatgattctacattactaatttatgttgtttttatgtcactttgttgtatgtttcccagttttgggtttcataaaagtatagtttcctctacaaataaaatcatacgaataagatttttgtgggtatgagaaaaggtaggtgttaaaactagcaagccagtgaacaggtgatgagattacggagtctataaccacagattgctattttcacattgagcctattataaccaaaagttgtttaacctataatcagttacttcttacttaaatagatgtactactgttctccaattaaaacatatgatgatatcatgttaattcaaaatctattcctgtttctatatttttatttctcttaatagggcttattaatttgtcgttcaagggatcagttacattggaattaatctcttcaataaatttaatttaatagcaagaattaatagcataaaacactgattctctttgactcagtagttcttccaggaatttatgatatgggattgagtgagaacatataaagacatatatacaaaagtgtccattgcagagtacttttattgttttataaagatagaaattgatagtataggatatgagcattttagaaaataagtagtggaacctctgtatgataggatattatacaattattagtgaaatttttgaaaattatgggatgacaaaatattttattgctaagaggagaaagtgaaatctgaaactcttattaaaataattactgaaggaagaaatatgaaaaggaaatacagtcccatgttaatagtgcttgtccattggaaaaatcatgggtaattaaaaatgatgggttcctagtcactttagctcagtcataaatttactgtgaagaattaggttctggccagtgtctagacccaggaaaagttaataagggcagtgaagcctttcctgagctacactcttctcagagattgttgtatgggtagtaggggaattttaaaggcaagtagtggctgtggagttaaagaagcttcttggagggctttagaaatactgggaaaagatacagggctcctttccatcttgcagtatggaaactctgcataaattttacttgtgcattcaaggaaagagttatctgaaggttggaaaacttggggcaagccagattccctaatgatagacacataccaaagtgtgttaatcattagagctgtccatccatgtttctagctctcctccattagggcacctagcaggatggtaaaccttgaagtcagggatggccatgtgacttgctttgagaagtaagatgtcacacttctggtcacaagcatgtttttttcctcctgtcaagatgacagatcttaatccagagtggaggctcgttcggcctggagcactaagtggtgcctctttctcacccaaggtggacatggagcccgagtgagaataaatgcctgaagtcagtgacattggggatttgtgttactgcagcctaacctcctgtatcctggctgatacattcactttttgagatagatgtattaagaaaaaattgtacagacagaaactaaaatatggcaagccaaatatcttatatgcattatttaacaaattcttcagaagaacatattgccaaaaaatccctttagaagttaaaaaatgttttataatgtaaatcattatggcctaataaatgtgtgtattgataaaatgttatagtatctcaacaaatgcaaattaacctttacaaatcttggaaaatcctttaactaaaggtaagttttaaaataatatgcctatcaaatgatggtaccatatttactgaaaggagaatctacttttacttccataaatatgtttaaaagaattagagcatcttgggaaaactgctgaatttagggctaaggcagtgaaagtacaaggtgtgtcaggagcattttgcagtggccaaaggtaaggaagtgttgaaataaataaagtaaaagggacatatcaaagggataaagaacaaacctgaaagcagttccaatggctgtttctaacacagttacagccaaaaaaaccacaaaattactaactataacctgaggaaccagataaatacccatgagttcatacatgcatacatgcacacatacatatacacacaaatggagaaaaaggaacaaatctttcttctacaagaattttgagtaatatgtgtaggtacttccccttccaggaggtcggcctcaattgccaccctcctcaaccttcagggtgggatagacttggtgactcattttccaagaatagagtatggaaaagtaaaagaaaatattagcaatttaataaatttttacagtgcagaaatctaacaaacactccttcgactgagcagttaagccatgcgtaaccacaatgcttaccactctaccaagtgatgtcatgtggatagcatgtctctcctaatacaatgtgaggagaagggcacttaacctctctgtcctattctttccaacatcccatgaccctatgaggaaagcaaacagaaaaaaatagagcaggggctcatcctacaggatacttggccaggactcttcaaggctctcaagatcattaaaaacaaggaaagaccaagaaattctcacaaactgtaggagaccaaagagatatgacaactaaatgcaatgtggtgccttggattagatcttggagcccagtgaggatgtaatgggaaagcgggtgaaatacaattagtatctgcagtttagccgacagtaatgcctcaaagttgttttcttagctgtgacaaatgtaccatcataatgcaagatgttgacaatggaggaatctgggtgaaaggtacaggagaactctctgaactatctttgaaacttttgcttacctataaaattattccaaattaaaaagttaatttttataaaggatctgttaaatgtgatcatttgacttccatatttattgtaccatcatattcaccagatgttactcatattatttatttgtgtaaccacttggtcaccaaaaaggtagcatttgagctttgtttcctccacctgttcagggtaagtagttgaaagagaagaaaccagagtggtatatttaatacacaatgattgagcataaaagtttgcatttgaataacagaaccaattttgaaactacattatagtgactttaaagagactattaatcagtacaccgacgtctattgaacttaattgtatgtgaacacaaaacaattaagacaaaaataatatggactttttgtgacacaggcagggcactctagtttttacacttaatcagcatacacttaaacctatctgataagtagactctattcagtgagaaaatcgatttagaatattgtgtaacacgtggagtaggggatataacaaataactcaaaagtaaattggaagtgaaaataaactcctagaaaatggaactttctccttctccacctaattttgaagagtatcaaaaataacacctggattttttagactcctattaatttcttgtgaagttttctgctatatttacatattctgttcatctctcaatatcaaatgcagtgtttggtaactaaagggctaagaacctaataagtaagacttttaaaatttaaaaataatcgtaaatgttgattatgttttatgactataaacactaaggcccaagtggatacatgaaaaagaaatgttttcctgtcctctaaatatgaagccttcctgaattccacactcagaatttagaatgtactattacaatacaaataaacctgaattataatataagaaaaaaacacagataaaaacgttgcatatctttacctttaatgacatttacctcttcgtcagaatttcaaaccccatcccgttttttaaggtccatttctactggttcctcctttatcgtgccttgtccgatcttctccaagaaaaaaaaatcaagtctctttcatagttccttcacatctaacttctatttattttatggcatgcactatttctaccatggctatattattgtatatatgagatgccagactagacaatgcattccttgacattcaagcccacttttaggtcatcttcaacactcccctgtcccagcaaggatcaacacctagggaatgtgtgtgggacagatgggtgaatgaacgctgctgcttcttggaactcaggcctttgagcataacttgcttggcatcctctgcatcaaaaaaatgttcagtattgtttcacttgcgccagaagagcttgtctggaaaacgtctgataagccatggtaagaaacaacacacaacccccggatctacctgaattatctcagcctaaagttatccgatctcgcttttgctagtgaggcgtgtcaataaagtcaaacccaagtttgagctttgatttcgggcctcagctgatgacagctgtgccgagttgatttaatgggttctgtgcagataaaggcggggatttgcaatgttaaaagtgtcttcacaggtgagaagacaaagatctctgacatgcttatttctcacagttcaggtccccgacccaggcctggaaacacatcaaaggccacacctttccttcttttcatgctctcagtcggccttctctcactttcagattgcacccctgcacgactcaccagtcaaacaatgcagttattatgctcctgggagaagaaggataattacctccacggccaggtgccagtagcaagtttccctgtggccaattactgtgtggtggtaaaacagctgaagctctgtttttaaaatctgtgttgtgttttttttaagcctttactgtcatgttgccagacactggccctgagccctgctatcgacacagggcgtctagctttgttttgaacgtgggttccattgtctttcactctctcccaacctggcatctcattatgtttatatctccttatcagagccaatgagcaaggggaaaacagcttcagaaaggagggagctgctgccccacagtttccatttatccaaccaaacccaaactgttttcatccctcatcagctgagatggagtgacagtgactataaagagaactgattggcttggagaaggtgagcatgattttaataagaagaaagtgaggacagtaatggagctttttgtcttttgagtgacacatctggaaactccccactggccttctccattagtttggtgaaaacctatcaaggaaacaaacaaacaagcaaaacacaagtgaatggcattaagtcctggctgcagaatagtacttcttgtctggggacagatgtgtgctgtgaaatgtttatccaccaccccacatgcttttatttgcagctgatgctaataattataaccaacatttcagaaatacctttaatatgccagacatcatcttaagcacacatgctttctcctcggtcacctcaacaaccctaacaaggtagtattttactttccattttacagaaggtgatcttgaagcttggaaagattagcattacagtgttacaaagctaagaagtgacagaagataggtctatttcataccaaagctcaaatctcaactacactgctctaaggggaacctctcacctccactgggctacttaaggggaaccagcgacccgacagccacaaggcacttcagaaaaaaacgcacattgctgagggtctaggaactcccaccacatcctcactgcaggtcctttattgctttacttgcctagttgagcatcaaacaaccttagttttttgagagtgccactattttatcaggtgtgttagttttgtgtgtcaactagatgagccacaggaagctcaaatgaaacgtgatttcagggtgtgtctgtgcgggcgtttcagggtaagattcgtatttgaaccaatggactcagtaaattagaattccctccccaggatgggtgggcatcacccaacccactgagagactgaatgaaacaaaaggcagagggaggaggaattcattcttctacttcctgcctgcttgagctggtacatctcacctcatcttctccagctcttggactgaaatttataccatcagcatccctgcctctcaagtcctgagacttggactaaattaaaccaacagccttccttggtccccagcttcttgacagcagatcgtgggtcttctcagcctccataatcacatgaaccaattcctcaaatctcctttcatatatgtattttacacatatatacacacacacaaacacacacaccaacacacacacacacctatagatacactcacacatctaggtatctgtacatatgtcctattggttctgcttctttgggagaactctaatacaccaggtgtttcaagcaaagaactttgctagcctgtagtgttaacctgcagactgctagaaattgtcatgagtacacccatttcttttagctagtctctgggatctagtagataggatcgcataaacttcatggttgacaaaccccaaccatatggacgtgtcaggaggcctgttcccatatttgaacacggcttctgcagcttctgcaggtgcagatggtcattttattttgctgaaaactaagtgcatacattcattttttttgtgttcaactctggtgccaactggagtcccccagtcactgaagatccagagatgagctccagtgccttttctgtgacttgtgtaaagtagaacagaccagtccccaagaggttttcagactcttttggtttggaggtgatacggtttggctgtgttcccacccaaatctcatcttgaattgtagctcccacaatccccatgtgtcatggaagaaccccgtgggaggtaattgaatcatgggggcaggttgttcctgcgctgttctcgtgatagtgaataagtctcatgagatctgatggttttataaaaggcagttcccctgcacacgctctcttgcctgccaccatgtaagacatggctttgctcctcctttgccttccgccatgattgtgaggcctctccagccatgtggaactgtgagtccattaaacatttttccttcattaaccagtcttgggtatatccttatagcggcatgagaacgaactaatacaggaaggatagggatagggtgggatgggggccctggagcagacgatcaaggtaccaggtcttctctggttccctccatctcccgcttctgctgcaacagttgtgggtcacatgttttcctgcaccccatccatgttgtccctttcatgctccttgggtccagacagaggactttagctcttattagccccaccccaccccaccccctctgccacacacacacacacacacacacacacacgaattatggactgaatgcttgtgcctccctcaaattcatatgttaaaaaccccacccactaatgtgacagtattaggaggtggggtctttgagaggtaattaggaatagatgagctcatgaaggtggagccctcatgaatgggattcacatccttatgagtcctgagagagcttgcttcccctccttaccaggtgaggacacagcaaaaagacagcaatgaaccaggaattgggccttcaccaggcaccagaactgggaaaaatgagtgtctgctgtgtgagccacccagtttacagtattttgttgtgacagccagagctcactcagacagggacacacatgctcatccctcaccacacacacacacacgatcgtccccctcacacacatgcacacacacagacacacacataggttcacctctctgtcctctctttctttttcttggatacacattcactttcattctcatacacattcacagacacacatgttcacacagacacacatgctcacacatgcattctcactcttacacacacacacccttcctctttctctttcacatacgcatctgagaaacctacacacacaaaaaaccctttatatataatattcttatacaccacaggtatggctttggggaagttgaagagtgtcttatgtcacacccttaactacttaaatttaaacgttagattctcatttataaaagtcttttgcactttctgtgattcttctgtgctctccctcttttccttcctttctcttcgtttctccctcacctcccttaatacccgcttcgtatccagcagagagcagctagttggctttttgttcctctgtcttctgcttccagggtcttcccttttattcctggcagctttaggaagtacaaagtttcatttatattcacattttcaaaaaataaaaagaacttgcacaattataaaacatagtacaatgatatcaaacaaatctgcaatcttgataatgagaattaatcaattataaatgcaaatgcaaatctgtagattattctagaaaaataaataagtggtctttatcctattaaggaatctttagtaagcttgcagcttgatccaatctgatcaggtgaaactgtattatggtttcattgaaaacattagcctaaatagataaaagataagataatcagcttgttagcaacttttaaaaactggtaacttttttgataatacttttcagtccctttccatcacttggcagttaattcaagtgatattttctctcaatttcagctaagatgcttaccaaagaggacatgtcaaaatcataactcataccctggctgtcttaggctagctagggcaatgtagcatggtggttagcacataggctgggctggtaagtccagcaaacgtgggtgtggatcctagcctggtcacttactacctgtgcaactgttatgggttgaactgtgtcctcccaaaaaaagatatactgaagtccaaacccctgtgacagcccctgtgactgtgactttatttggaaataaaatatttgcagacaccatgaaattaagatgaggtcatttgggtgggccctcattcaagatgacaaatgtccttataagaagagggaagtttgaacagagatgtgcacacggagaagaagtctcagtgaccacagaggcagagcctggagtgatgcagcacaaaccaaggaaggccacgcattgctggccacaccaggagctaggaagaggcaagggaagattcctcccaaattctcagcgggagcatggccttgctgacacctcaccttagggtatctagtttctagaactataacagaatacatttatgttgttttcagtcccccagtttcacccagtttgtggtactctgggatatcattgcaccccgtttgtgctgtggtatggcagttccagggaactaatactgtaaatctcataatctccatctgtgtaaaatgcaaatcacaatgctgatagtagtgcttccctaacgagtgtattatgaggattcctcaggcagacatatgtcacattctttgcacagtatccggcacttattagatgctcagtacatgttgcttttattaacaaatgttagttattatcagacataaacagctgaggtccctgcactccaggcagttataacgttaggggtctcatccatccacccaagatgccaaccatttctagaacatgtctactttaatatctctagctatacaactgattgtaattttgtacttattaatttagggctacaaacatttcctaagaaacgttccataaatagttataaaaaccattgaattgtaaggaatgagctattaatctgagccattgggcattaccttgatatcctcttcactacccagaaaattgttaaagggaaccttccttgatcagtaagacctgagcctcctgtaagatctgctgccttcccgtttctctggattctgtaaccatgaaagttgacttttgccttgatgctatggaccaagcccggctctgacaaccccacagctaagatgtttaatggatagaatataatgtttccttccctatacttcttattctctatgatttttaaattttctaaaataaacatgcattattgtaataatttaaacacataagatatgttttttcatattcaatgctactttcaagtagaatagagtctgatagaaaaatataaaggaaaaatcatatttctgatgtacatttgtaggaatgtagtattaagctacaaaatgctgtgcccacaatctgtttctagatgagcctcggtttccttatttgaaaatgatgctaacaagggtgtacctctccggactactgtggagactggatatcctatgagggactatcacagggtctttaatgcagtaagtgcctagcttcctgcttctcctccctttatatttctcgtaacttttgaataaatttccatgaattcaagaaaaaacacagtctttgcttgttggtaatgttatctgttttgttttgtttttcctgaatcatgtggaaggtagcttctgaaatgtctcccagtgacccctgccttctggcagtcacagtcttatgcaattgtcttcccttgggtgtgcactggccctggtgacttgctccgaaggaacagaattcagcaaaagggatgggagttcactctgaggttgggttacaaaaagactatggctttcattttgcacagcctctctttctctctcacttgttcagccaccacactgtgagctgccccatgggaaggcccatgtggcagggaacggagcgtggcctcttgtcgacaaccatgtaaacgagcttgaagtggatccctccctagctgagccttcagagaactgaagcttcagtttataccttgattgcatctttgtggaagaccctgagccagaggcaccccactaaggcatctggattcctgacctgcagaaactcagagatagtgaacattgttgtatgaagacactcagttttagcataatttgttgagtagcaatagttaactaatgcagatcaatacatttcatgcagtcattctctactatttttattctaacccttctaggtggcaacaatctccattttgtcacacacatactctcagacaacagtttgttattctcactctcattgccccctagtcctgtgttctgcagaggcctagctagatgctacctattgataaaacagatgatgcttctttcctacaaatgccccactctggtccttgactcatgccctaatagaacccatgtccctgtgaaagctctctcaaaaactaccttttccctcaatgcaatgagtgtgtagcgcccaaatatggaggcttgtgcaggtgcgggatgccacaacctcaggatggagtggcttccaggagagtccacataagtgaagaagggctgtgctgctgaactactaaacctaaggacgatgtcaagatatgcctgggaaatgacagcaaactgttgcacaggaatgactgagaatcacttcgccaaccaacacatgtgtgacgcagtccactgattttttaaaaactgctgtactgaggctgggcacggtggctcatgcctgtaatcccagcactttgggaggctgaggtgggcggatcacaaggtcaggagatcgagaccatcctggccaacacggtgaaaccccatctctactaaaaacacaaaaaattagccgggcgtagtggcaggcgcctgtagtcccagctactcgggaggctgaggcaggagaatgccgtgaacctgggaggtggaggttgcagtgagccaagatcatgccactgcactccagcctgggtgacagagtgagactccatctcaaaaaaaaaaaaaaaaaagaaaacaaacaaaccaaaaaaacccagaaaactactgtactgaagtatgattcatgtacacaaagctgtatcactgatattttaaaatttgaatctctcctgtgtttacaaacggaagggaaaaagaacaatgattgtaaaaaagcttttgccccaacagtcaaatattttacctctatgcaaataataataattataaataattttgaaaaaagtggccaaactacaaaaaattctaatgagtatttttggcttaattgaattaaaagcaataaaaatagaagttcactcaagtctttgtcatatttaaatcatatagtcacagtatctatgtgttaacgtcctaagaggcaaaattgccagcaatttattcatcaggtaatataggtaagtagagagcagctttttaggctaaatattttagttaactattttaaagtccccgcacagtaatacacagaaccccaaatcatgctgattttgttgttgctgtcactttggaatccaatatcaaatgtcctctggccatttcctccttggtaacagccagggcagttctgaaagtacatccttccccaattttcttagaacttgtagtgtttgtgatatggtttggctgtgtccccatccaagtctcatctttaattgtaatccccataaaccctaggtgtcaagggagggacccagtgggaggtgactggatcatgggtgaggttccccccatgctgttctcttgctagtgggtgagttctcagagctgatggttctacaaggcagttttccctgctcttgaatgctctctctcacctgccaccatgtaagatgtgcctgcttccccttctgccatgattgtaagtttcctgaggcctccccagccatgcagaactgtgagtcaattaaacctcctttctttataaattacccagtctcaggtttttctttatagcagtgtgagaatgaactaatacagtttgttttcttaattttcatgtctgagcacagaacagaattgagaagtaagaaaaattatatgtaggaaaattttcccataattattccttcaatgtcattgtattccaacggccagcaaaaataaggcgtgaataatatcacaacctcattgttgaccttgagaaacagaacttgacttcaaaagtcaagacatgcccgactgatggagcttaaggccaatgaaaaaaagaatgatagagtcaatgactgggtggttaaggagacataaagaaaccagccatttgaatgcgctcaatggaataaacaacctgcaaaaattaacccatgagccacagtgtgccccctttttgatcagctcctgatgctgtttggggtgttgagatagcccctagaagggatctgggcacatgctgcattgctcatgaactgtctgttttatgaaccttggactttgagatcttggccactgctgcctggatgatgttcccaaatcatatctggtcagtgtagagagagatgggaatctccacattccacgatgttgccagctcattgagcaggtactccacagatgagttcagtcctcttcatataattccttgtgagtcatttcccagaataagcccaggcactttgccagtgtattagtccattttcatactgccataaagaactgacccagacagggtaatttataaaggaaagaggtttaattgactcacagttcagcacagctggggaggcctcaggaaacttacaatcatggtggaaggcaaaggggaaacaaggcatctccttcacatggtggaaggaaggagaagtgcagagcaaagggggaagagccccttataaaaccatcagatctcgtgagaactcactcactatcaggagaacagcatgggggaaacctcccccatgattcaattacctccccatggtgtcttccttgacatgtggggattatggggattataattcaatatgagatttgggtggggacacaaagcctagccatatcatcctggtacatgggacaagtcttgccatttctcttccataattcctttttaacaattgttccttgcccagacttaacttctttctgggttgcctgtttttatatttctatacctttttgcccactttaattatcctgcacatctaaaaaggtacgcacagccaccaaaatatgtgtgtgtgttttctgctaacttacaatttcacaagctggagaggcacttaggaacttcagttacaatatgttttcagtctttgacataataaaacatacgccacatacaaatgaagtttagcactcaaatcagttaaaaatcttcctacatgttattagaaggggtgatttcatcaggcatgtttcttaaatcaatatgcaataaagtctaaagtgaggtcaacccatttaacaatcgacacccccacaaaaataatagggatgaggtgggaagggcgtaggtcttagtatttattatgtttccattaatattctgcagctctgtgtagctctcctgggtcatggttctcaactcctccagggagtgaagtttgaagctggagaagtggagaaggaacacagaatttgttctcaagtctctaagtctcaagtctctaaggtgattacttctccctgcttcttgacaaatccatcagctctttccaaatctaaaaaagaatcagggatatgccatgttttgggaataaggtgtatagtttttttttttttagaggtaatacgtttgtgtgtcatttatcagaaaatgtaggtattgagtcaagaaataattaaaaatcacatattttgcttccttgttactaaacattagctattatgttacaatgtaataattttaaaagtaagcaggggatgactattttattaaatttaaataataatatgtaatatcaaagagatggtttttaggggagtcttgaaatatctttataaacagtcacatacttgaatgtatgtgtatataatataaatataaaatatatacatgtatcattgttttatattaaatgggtactgtatatatttataactatatctagatctatatatccaccaactccctcttctggggtcccatagcatcttctgtataccattacattagttctgacttattgtactaccactttctttttaaatatttgtctttctctcttgactgctcattccatgaaaacagaacctgtgatttatttgactgctgaatccccagttattgatacagtgcctcagatccaataagtgtggatgaagtgtttggaaaagaagcaaggagtggttccagattgatcaataatcatacactgattcaaaaccctgaatcacataggattttgcccactttaattatcctgcacatctaaaaaagtgtgcacagcctccaaaatttgtgtgtgtgtgtgtgtgtatgtgtgtgtgtgcctgtagccattcacaggaatattgcctggggcaagcactggaaggaggttctgctaacttacaatttcacaagctggaaaggcacttaggaacttcagtttcaacatgttttcagtctttgacataataaaacatatgccatatacactcacataggatacagtcacaggattcagggttttgaaggatgtcttcatggtacaaaactttaaactgtttgcattcggaagataaaaatactaaagctcttcctggttttcttgacattcccaaggaaaatgcttttttttttttctactagcaagtctttattcctttaataacgtcatatgattgcatcgtttctgttatctactgctgtgtaacaaagtaccccagagcttagtaacttaaatcaaccattttatttttctcataattttggggagtcaagaatttgagaaggtcttggctagatgatccacctcttttccacgtagctttagccacagggacgctggggctggaggggtcacttctgagatggtctctttactcacatgcctactccttgtgctcttggctctcctctcttctcctcccctttcttcctcccctcccctctcctttcctttttctccctctccttgtgacatttcactctatagagtctctccttctgacttgggcttctcacagcatggaagcctcagtctgtgcattcctgaacttctcagacagcaatttaggactctaagagcaagttttccaagacactcagggagaagctgcaaggctgttgtaaccttgcatgagaactacactgtgtcacttttgacaccttctattggtcaagcaagtcacagagcccacccatacttaagggttgggaacataacactctcatagaagacagattagaaaatttctgggcatctttaatctgccacaagactcataaagaagacataggaataagttctctcttttaaaacacatgggtgtattttgtgaaccagggttgcttcatatatttttgtagattcattcaattaattaattaacaaagaaagaaattaggagaaatatttttggtgatgtagtatgcctgctattaacagtttacagagtttatttttgtttaaacatccatcctataatatagtttttataagtttgaaattgggtgatattattaatttgaagaccaaaccagccaaaatttgattatgatcaaaatgaaattaaaggatggataaatagttattcccatcaaactagactccaaatatttaattaaactccaaggcttttaaccaaacatttattcccttagactcttttcatttattcttataaaaatccttgcatttataattcattttcactttactcagcaaatgttcttttgtaatgagttgcttgatattcaaaagacttctgagtctctcaattctatttctgtcaaaatcaggaagttgacttttgccaagaataaatgaacttgaatacagagttttaaatgtggttcaaaggatgaaatcctcaaatctcaggcccattctgatgctggcaagaccctttctcctgctcagactatgaaataataatgatgctttttaacaattaaagctttgggttcccaaaaacctgaatctgttgctaaatttcacttaacaacaggatcttatttttatctttagcaaatatcctgggacatgtataaataccagggacaaactgcattacagatttaaatttgggatgaaaaaatcaatatttcaaagtatgacaggaacagattctataaaatgaagacaaatcagatactgcattggctaacttccaacaaagaaaggacacaaaaaattgagaaagtgaagtgaaatattaaatcatataataaaacttttcagatatgattttgaaaccttggagtcttaatttaaaacataagagaaaaaaatctaatttaaaaatgttagtgttggccgggtgtggtggctcacacctgtaatcccagcactttaggaggcagaggcaggcagatcacctgaagtcaggagtttgagaccagcctggccaaaatggtgaaaccctgtccctaccaaaaatacaaaaattagtcgggcgtggtggtgtacacctgtagtcccacgggaggctgaggcataagaatcacttgaacccaggaggtgaaggttgcagtgagccatgatcacaccattgcactccaggctgggcaacagagtgagactctgtctcaaaaaaaaaaaaaaaaaaaatagtgctcttttgtcattcaattttttgaaatgagtgacgttaaataccaagttgtaattgtttggatgaatatatctagaacctgtaattgtagcagaccaaagaatatatgagttatttgtgagcattaaccaagcacctcctagatgctggaagatatttttccaaagtggattcttatatcttcctcagaaactttcaaatggacttcttcaatctgatccattaatgcaattacattttcattttcccattttacttagtgcaaagtcaagttcaaggaaattcaattgtatagccaattgttagatctccttcaaatcaggtccaaactagcaacatatacatacacacatgcttcaaataatcacattctagaatcatcatttatctaaattacagtgtgtgaataatgaatagtttaatttggcttcagagggtagaaaatattaggggccagaaacagtaggtttgagaaatatgtacatggctgtaaacccagtcatgcattcttctcttagttactccaggcctaggactgaagacaagcaaacagaaagagaagcagtactcatacgtgtgtgcttgtgtgtgtgtgtgtgtctgtgtgcgcgtgtgtgtgtgcatgcgcactattcgtaatccagataagatcttccaggtaagcacaagcaattgagattcagttcattttatcattgtttattcttttattcaatattaatgtccgccaagtgccaaaaatggcattagaaatgtttttggcagagaccactggtgcccactgaatatccatagctcctccatatttcccagtagttccaccattccttgaagtgtctgagttcttcaaggtctggcaaaagaaaatgtgagcacttttgttctggggcactcagtagtcagtgtgcctcctctgtccttaatttccctgccagggagacttggaaattctctatcttttctattgctgttataacaaattatcaccagcttactgtcttaaacaatgcaaacgtattatgttacagttctggaggtcagaaggtcaacatgggactcccccagctaaaatcaaagtggcagcagggttgtgctccttctgaaggccctaaaggagaatctatttcctccattgttttcagcctctagaggacatctgctttcctttgcttgtggccccttcctccatcctcaaagccggtaatggcagatcaggtacttctcacatttcttctgtagtcactgttctctctgatgcatctgggagaggttctccgttttcaaggatttatataataggattgggctcacctggataatccaggctgattaccatctcaatgtttgtaaacgtaatcacatctgcaatgtccattttgccatgtaaggtaatatatgcacaggctctgggaaggaagtgtggccatctttcaggacccttattctgcctccatagaagccatatgggaagatgctgggatgcaaggtaaagggggcctggatctctgaatcaccacatggagaacagccattatgcacccatgttcaactctgaacaacaagacgtaaacttttttataaatgtccatgctgtgagatttgggggttattctgtgtgacagctaccatcaatcattctaactaccatggtgatggttaataatttgttcaggtttgttttagctttgtagcaaaactacaaggctagactagctggactttccattccaatagatataattaatatgcatttgcagaaataatgtctcccttgcctttaaatctccagccattaatagagagcctaaaacaatacatttttgaatggaattgaatgaatgaatggaagcaaaaacaagaaaacacataacaataacaatgaaaaatgtggacaaatgagacaggtagacctattttaaacaattctttaagtgaagaggatcattttggtcaaaggctattgttctttcctgggctgatacgaggccaggatttctctgggaatcttccactcctactcatctcacgctcaagctggccagtccacagaaggagctccaggggagcaggattttgtggtccaggcctgtggccaaaggttgagccctaagaaaaatggaccactaaggagcacagtgagagcagtttttgtcatccatcagaaaacagcatagactttggaaacagttctgagtacaaatcagagctcaacaaatacttagcagtgtggttatgggcgagtaactctgagcctctgtttactcatctatgaaacaagataataagcctaccttgcgatggtgatgtgagaatttcatggaacataactaatatagcacagttccaggcacaaaatgggctttatttgtattattctgagtcaatagggaaatcctgagagaaaagcaagaatgggtttagtttatccttctatcctgataaattcacctaaagctttctctagatctgaaagtttggaagatgattttattcaggcaatatgtattctgattatgttattttgtatcctagcaacctagccagacctagaagaatttcaagatcgacacttaattgtaaaactttagatggaataatcatgtagatttttgtttgttttaaagccgtgtattaaaaagaaaaccattatcatcatgtataaggtgatgcaaatacttaattagcagaatttagtaaaacattatttctaaagctgagattaatgagctctcaatgtatggaaataagttttaaaaaataatcaatgagaattgttaggttttatttatcttctaatagtttactgcacatattctcaggtcctgttaggaaaaactaaaatattcactgtctcatttggaaagaaataaaccatgtaaaaagaagccagcaaaatccttttatatgtaacatgaagattcgaagaggctataaatattaatttcaaaccaagatcactcaaataggagggccctcaaagtgatattgcaaataatttcaagttatgcaatagctcaaatggacaaagaacaggaataatttactatttgccatatgcaatggacaggctgagcgaaacagcattaggcagacaaaacccattcaactatgtcaacttagatttatccgaaggagtccaatgacctgctcagattgttaatgaccatgagagcatactttcttaaaaaaaaactttgtattttagaataattttgatttatagaaaagttgcaaagataatacatagtttcctatacccttacccactttcttctattgttaatatcttacataactgtggtacgtttgttacaactaagtatgcagcattggtaatttctatgaactgagtcctaccttttatttggatttaattagttttcttcctgacatcctctttctgttccaggatgccatcccacattccatttggtcatcattgctccttagtctcctctggtctgttacttttctaagacattccttgctgttcatgaccttgacagttttgagaagtaccacactaaagtgttttgtaaaaacccctccatttgctttgcctcgtgcttttctcatgactagctgggggttatgggtcttgggaaagaatgtcacagagaggaagtgcccttctcatcacaccatatctggggcacatggtatcaacacggcttatcactgatgttgtcaatcttgatcacctggccaaggtaagtttttccaggtttctccactttaaaggtagagcagcagtgacttttctccatctttccatattgactttttagacgcaagtcactaagcccagcccacactcaaaggggcagggagaagatttgactccacctcctggaaatagagacatctattcacaactcttctgtaagggagattccccgtttcccatttgtgtatttgtttattcaattatttgtttatatcaatatagactcataatttatatcagtatggatcatggaaatgtatgctttgggttatagtccaattctatgttatttattttcttgctgaaattgctccagctttggccacggagagtttgttcaggttggctcctatgcccttttctgtgtcctcaaccttttgtttttctagcacttccttactttctgtaattagaaattactccaggagcatcttgaatttttcctgtcccagtcctagaatctatcatgttttcatctatttttaagaatgaaagaaaattattccctttaacctaaaaatgggcaaattcacagatatctcaaaatatcacttgtgtttagatttgttagagatcaatgaagtggctattttgaggagcatttttctgaagaggcattatctctcctaatggagctaatgatatcaggtattataagagtcattaaaatttagaatctggttggatgattgatccgtttttgcaactccgaatattttagtgacaaacttctagccaaaacatctgcatttatatgtaggtgaaattaggtattctcctgccaaaccgaagaataggtctcagctgggatagctcctaccagagagaaatttgcattgtcttgaatgaaaggggtttcagttgaaatattagttgggttatgcctgtaagggtgtttcaggatgagattagcatttgactcagtggactcagtaaagtcaattgccctcctcaatacaagtgagcatcattcaatctgtttaggaactgaaaacaacaatcacttattgagtcacagttctgtatgttggcaatctgggcgggcctcccctgggaggttcttctgctggtctctcctgggctcagccatgtgatcatccaatgccagggagacggaaggagtaacttgtgttgatagctttacagtttgtgtttccagtctgttataagaactgaccataccttgttcctaggattctcgaaatgcatctgtatacttccaactatattgcctgaatctttgataattcaagtgagtttctgttcctttagacaaaacaatgaccaagaaaagtttctttaagattctattttaatgtctgtattaattagaatatgtattatctgtccttctaataacaaaattcgacatcccggtgatttaaaataataaaaacacaattgctgctcatccagcagaggtggcattggacgctgtctccctggcattacccaatctgttaatggaatgaaaacagcaatcagttattgattcacagttctgtctgttggcaatctgagcgggcctccactggaaggttcttctgctggtctctcctgggctcagcggcgtgacagcagtcagctggtaggtgagtggagtgcagcagcctggtcttgcctcacgcacatgtctgccgctgtgttccgactgtcagtgaggccctccctccacatggtctctcatcctcaaggaggccagcctgggcttcttgcccccagtatatatttaacttttgagttttgtgctttcagggtcaatgtttttcatctctggattcagaccacaagtcacatacaggcttgtgctttcggacaagtaacttaactgctctaaacctttgctatgataataaaaggagaacagatacaaaccgcataatgcgatacctggcaagtggaaagtctcaaaaaccatcagctactacaatgagtattgttgttgttgttatttttagtattattattaaatctaacacatcccttccctgccacgaggttaggtgtgatcatgtgactgacttctggctgaaggaatgtgagaagaaatgacacaaaccatttgtaggcctgacccaggaaaacttctctgtgatcctctccacactttttctccttcttggtctgccagctggatgacacaaaaaatctaaagagaacttggggaccctaaggaatcaggagccacaaattggaaaggtcccgagtctttgtgcgtacctgtgaaaggccagtcactgagcatccacatctagtgcatgagctggaattatatttttattattttaaatcactgagatgtcgagagttttgttatttgagggacaaataatatgtatcctaattaatacagacattaaaatggaatcttaaagaaattttcttggtcattttttttttctaaagaaacaaactcacttgaattatcaaagatttgggcaatatagttggaagtatacagatgtatctcaagaatcctaggaacaaggtacagtcagttttcatgacagacaggaaccacaaactgtaaagctatcaacataagttactccttccgtctccctggcagtatatggaggcttatttctggttttctgcgtgctctttatttctttctttctgcctacagattggctttctttgcttctcaggttgccctagagaccctctcagagatgattggctcaagctgagccaaaatgtactccctggtcgaaccagctgtgactaaagggcagagccaccttgcacaacagtcagttcccatagaaagaaggggaccccccttggctgggcgcggtggctcacgcctgtaatcccagcacttcgggaggccgaggcgggcagaacacgaggtcaggagatcaagaccatcctggctaacgtggtgaaaccccgtttctactaaaaatacaaaaaaaaattagccaggcgtggtggcaggtgcctgtagtcccagctactcgggaggctgaggcaggataatggtgtgaacccaggaggcagagcttgcagtgagccgagatcacgccactgtactccagcctgggcgacagagtggaaaaaaaaaaaaaaaaaaagaagaggacccccaaagtgtccctaggaacattagtgggattagacagaactcctgtttaactctctggggtaggtgtcagtgagaccaacacttcccattttactttgtaagtagtccttggtttttacaacttgcccatcaattgattaaaaaaaaatttagtggaagagtcttccctttacttgtctattataattaaaactatattgtattttttaaaatagattttatgtttttaagaatagtattaggttcacagcaaaattgaggggaggggacagagattttccatatactccctaccctgcaatgtgcataacattccactttatcaatatcccctaccgaagtggtgcatttgttacaactgatgaatctaacttgacatattattatcacccaaagttcatagtttacacaacggtgcacccttgatatcccttggaattgtatctaaattattaagatgttatattctaggctgttgaagcaacatgtatcactatatcatccatcaacaaattttagttttgtgctgttgaacttcactcggatacaaggtggaatgttttgttaaaatacttgaaatctcctactggccttgacgtttagataagaacaatttgtcagaaacctatctcattatttccaggtagcaggattcatgcagagtgtttgcaacacactgatgctgtcttaatgctgaacaatgctatgttttaagctttggaaagtggatatctcctgggtttactctcgagctccctgttggaatgattttatacttcagctctcagtgggaatctgcctccaactccccagctggattgctttgctacattaggggccaatcagcagaagctgtttatctctcagaagagtatgagctgttgtttcccaacacacttagtgctcccttttcagagacataaactgtcattttcagtaagtaatttctattgaatcactggtgccagataactgaggatgataacaagagtgagatggttgccatgaaaaattgctaatataaaatgtgacggcccttctcagcaaactaacacggggacagaaaaccaaacaccacatgttctcactcataagtgtgagttgaacaatgagaacacatggacatagggaggggaacatcacacactggagcctgtcagagggcgggtggcaaggggagggagaccattaggacaaatacctaatgcacgcggggcttaaaacccagaagatgggttgatcagtgcagcaaaccaccatggcacacgtatacctgtgtaacaaagctgcacgttctgcacatgtatcccagaacttaaagtacaatttttaaaaaatgtgatggtccgtccttagcttgcacaagcaaggatgacagaaatgacaccagagagagggaagcaccacaaactgattaggtagagtaattccaggggtctttttccagagatacctccctgttactgagcaagggacaaggattggggaaggaaaggtgacattgttgaaaaaatacacaaagatggcatctcttaaaaaggactgaggtttctgccttcccttagattggagctgtgaatatgtgaggcagatttgaaatggaatcaggtaattaagacatatccagggcggggagagctttcagaaagtctgaagtgctggccaagactgaggctcagggaaagtcagagccatagaaaccggccacaagctgcagagactcataagatatctggacccaaatggctcaaccaaccatggagcagatggaggacagtcagaagagcaggaggttcaggaaatctcagctaccgtatttccatttatcagttgtctattgtgtgttatttgccatttttgacttcttttctgattactttgtggtagagagttctgaagagtgagaggcccacgccatgcctttcacattcttcagagggtctcagggtgcccataagtgcaagcttgccagaaaactagaaagagcacccatttgcagcacttaccaaggagaggcactttagtaagggctacacatctccaccagagtccaggaataaactattatcatcattacattacaaataaggaaaccaaggctcacagaagctatggtacttgggaaaactgggacatgaatcttgttctctataacttcagagcccacctctaaccacagaaatctgcttctctctagctgtatgggataatcaaggaaggtatactcaacttttattgcatgaagagttctgatgtgcataaagagctctgatgtggtccaagaatcaacagctgtgtatttcttgcttctttgttctggcttcagacactttgtggaggagctgactttggttggaatggttgggtcagataaattatttcagggctaagcagagttctcagagatgcacagccatggggcattacagcagcagcatcacagccatagttaggagaatgaggatcagagcctggtgaagctcatgtatgaacttctgggagcctcaagttttgggtgcatctcagaaatgaaaatggtcagcagagtgcaaatgcagaagcagtaggcaggactggggttgtcccaggcttcacagcaaggaccctcctgctcccatggtgctgagcttcggatgcggttaggaggaagcacttactgcacaatgtgggggaaggcatgacggcttgaaagaagcaaagacatcaggaagaactgcactgttccagtgcctttgggatgctatttttcaaaagaagctggttcctgccacccacccccgacattttgaaattcagcagaaccatcactgttggcaaacatttgctgctgactctctgaaaggctatgttgttatcttatcaacccggctgactcagagaaccatgcgtcaaggaggggcgagagtctagtagattagatgcaatctggggtattccccagtctggggttatgattctaggatggcatgatgcctgttgatgtagcctactgcctggccttgttttgggagcccctgctccccaaactcactttggctgccattatccaagactacaggtgaccattttacctcagagtcttcctcttcctgggagtatccctgtggtcctctgcctccttggcctctctgtgcagtgttcttggtgtctagtcacttaatgccacagactgtacagaagacctctgtgtgcacctttgaagtcatctagaccattcccatcccattcttccttcagtcactggagtttatggacaatgcattgttacagaaaacccattcttgatgtctttggagtccatgggttttaagaagcaaattctagcagggctaagagcctgcaagggtaattaatagatgactagaagtcagtcaattagcagatctcattagaacgtggtctttttaagtcatcaattgtctcacccagccaccaccgatgtggaagtccagccgacacctgcagaccactcagcacatcacagagcacaactgccagggggggcttgtccattggatttgggctgcctggcctttgtgtgtcacccagtagaagtgaggcccacccacgccataagagttgctgagccgagtgagaactgcctcatggggacactcctactcttggccagacatcccaagcactcctaaagtagaagtgatgatgctatggaagtgagagcataaggcaactgggcttctgcaggaatacacggcggttcaaactcaccatgttacagttgggaacttgctcagggcataagcccacctatgccagctagaggcaggcaccattaccctatgcagggctaagcagaagaagcatggggtttaagtttaagcctagagcagacaggactcccactgacccttggttcctacatcatacacattatgtttccaatggggaactcaggaggagcaaggtaatggtgccctgtgggcgaggctgtacaagggacattctagggcagaggtaggatggctgcaagctggggagcagcagggctacagtgccagtgagatccagcagggctccaggaaaggtcactgggtcttgtctatgttgggacacgcagtggcaggctttggcagctgtgaacatcagcagttagtgccaacagggcatcctgtgatcaattaggataaggatatgttcaaggagtcaagaggacccagagaagaaaagggtacctgtatccagatatgaggaccccattccacctctgccctaatgacaacataggccacccgctgtgtctagatgctatcttgaaaagaagaacttggctggccagggggtatggggcaaaagggaaggtattagaaaaaaaaaaaagttaaaaaaccttgaaaaaaattgacattttcccaaaagaggtgacattaatccaaagtaagactatgttttaaatgatgtacattattaggcagttgtggccatctagaatgatgctgcccaatataacagcccacagttgcatgtgacaatttagatttcaatcagctaaaactaaataaaataaaagattcagttcttcagtggcaccaatcacatttcaagtgctcatagccacatgtggctcttggctaccatgttagacagagcagatatgggccatttccatcatcacagaaagtatcactggacaatgctggtctaaaacacaagcccaggatagcaggcctcttctctgtcttattcaccacagtatttgcaggcatctagagagagcccagcacataagtgaaatacggtcaagaattttcctaaagttcagctctttaaaatatggtcctcatcaacctgtccaggctttgtttttcattatttattcattcattaaacatagatttatatttactgatgtgccgggtgctctgctagatgctgaggatgaaaaatgagacataatctccatcctcacagagctcacttctactgggaagacagcaaatcgactagacaactggtccacccaataattacaggtggagaaaaacactataaaggaaagaaacatgatggaaaaggccacaagcagctgctgccaatagaatagttggggaaggtgtcttcgagcaggggacactccagccaagaccagaagctccttgaatccctcttcccagtctgccacagtgggtggtacctaaaagcactcagtcaatagtcggtggatgaatcactgagaaggagccaggtattcaaaggatcggggaagggcattgttggcaaattgggtctgaaacctttaatgtgagactgagcttgatcggtgtgaatagcagaaagaataccactaaggctggagcagaatcagcaggtgggagagagaggtgagttgggatttgaagcaatatgggggcctcttgcttaggggtgcatgacatgatctgatgtatgtttaaataagaccactctggccactccacggagactgcattgggatggggaacaggtagcaaaagcagaagcagggagttccgcaagcaaccttgggcagcgcccagcgaagagatgatggtgatgccagcttggagcaggctgagagctgtcggcatggagatgtggccacgccccactatgtgtcagtgaaattggaattagtgtctccaaggctattcctgctgtccttcctgttcggcttcccacgtccctccccacttctcctgcctcggcttgggatgctcttccctctcattttcactttcaaaattccaccttacccttcagtgctctcagaagttatcgtcccccttggcaaagtcttccctgattgttgtggccggatataatttgcctaggcttggaaaccttacagcactgactctacatgccatctgcatatgcagcatttagcacactgcctgaaatctgattgaacttggtcttctgtattgcatggagaaccactagatgacttgggcctcataaacatcttcttgtaccctctttcagggttagcacctagtccactatcttacatatgagtactcaaaactatttgttgaaggaacaaaggactgtctctgtgcttgctggtgtgtatcgttctcttcatttaacatctcatttttatttgcataaccccacctctttgaatatcatttgctaaccaactctatggaggaaatacaaaactattcttttaaacataggatctgtccctggtgggctgcacttggcagcagcaatggtctgaaacctccaaagacttggtaagagctgtggggaagtgcaaagagtgttcaattaactctccttactcaaagtaaatggaggtacttaagccaacagccgtatattctcaattgctcttatgaccagactgtgaactccttaaacacgatttattcatctcagttcgtgcaacacggcatgtgcctggtgcacagtaggctctccagacatgttggttgaatggataaatcataatatgagcattgagccttctgctgggcccacttggaaggcaataaaccgcatagtggtagctcaccccggaattacggagtcctctgagaggcaggtctcaccaccatggagaaggtagcactaccattttactgcacagtcttcccaaatttatgcgttaaaagtgtgcagcaagtaggtaaaaatgcaaagataaacctgatcaattgtttctgtcttacccatcacctgccaccacggagagtcattgttttctgtctactgctttcattcatctttttccttgccctggagccgtttttcagggttcctggcaaggggccaccctccttccctcatccgatcaggccagaagacagcgtgagttgctcttttccctttttcttctttgttttcttttgtaaagagtttccatgcatgttatttgtaaatatcagtactatgtgttttttggcattagcttagagtatctaatttgtgatatcttccagttcattacttatagtcttaatttcaggagcaaaaatgagaggatctctaggcaggaagctgtaaacgaggctccatgtgcagtacatgtttggcccaggtcttccatgagtattctacgtttgctaccatccctgaaataagtgcttccttcctcctctttttttcctcgtggtgaggggaggggagggggttcctcctattttctgcaactgtttacttaagcaggcatcaataattcaggacatcagctccatttctgaaagcccaggtgagggcaaagggcttagcaccaggccagcggctcatttactcactcctgcaggactccacagagattgcaccaggctcctgcccggccagacctcagccacacttgaagaggggaagacggtaagcattgacttcagagttcagatctcctttgttttctttccttagctacttaccagtttccctgaacctatgaagatgccagaggccgtctctggagtgaggcctctctgttggttttgagctgcagcatgccacccagagcagcctctgatcccagcctcagacccaggcttctgaaaccagaccaggtaaggagaatttgaatttattccttaatctgacaaatgtttatgagactcaaagatgaaaatgtggctgtgacttaagagaggcagaattaaagcctgagctatactttctttatacctaaggtcagaaggcgaccgagacatggtctcacatctgggatatgtgtaagtttcaggactgcagggatctacgtaaacaggtatttatagcctcttcctcctgaaatgattcaaggtgctgggtctctttgttctgcaattgagtctggtttctccaagaagtcctcaaacatctctccttaagttcaaaatgtctccttgaaaataaaacctaactggtctgagacattatttgggatttctagttcaaaatgtgagaaatgactcctactgccaggataaaggcacaagtacatttgtccatctctgccaccctttccacccccagccctacatgccccactcctaccttcagccgggtcacttgtaacctctgactggggagggtcatctctattttcaaaaatatccagagaagactcaagaacgttccttgatatctccactctctcatgcaatgatcctcaacagcaacacaaacttcttataccccaaaacactcagaccacttttgagagctcttcctctctttcatctctcccaatcaatcaacgatggatcatttgccaccattcttctgatagtcacaatttgattaactcaaaggcgttttacagttgtgtttatagttctgcttccatgaactctctcctgcagttgcttaactaatctttccctgccccagactttgtctagtccagtgtatactgcaaagtattgccagtctaatctctctatgacagttctgatcaagccactccccaacccatcccactccaaacaccctacccccatcaaaggtatatggctggtaagtgacctgagcgagatctctctaggagacccactgatactcatgccttacgccgagctctcggaattttccgagcatctcttttgctctctggtgtctccaccattcacctcttaagactctctcaacccagcaggctaccctccgttcgcatttctacctgtcaagatcctatccattcactgagcgtcacaggagaattgtagtttattacatagggtccttggcctacttgctcatagtaggtctagctgggaagagagacataaacacagacatttgaatgcatacagtgctttgggggctgctaaggggacagagcataggagcccttagcctttgtagagatgacatttaaacagcttcttgctgggcaggaaaaagttggccatataaagaagttggtggaagggtattgcagataaagggaaccacatcagcaaaggaaactaaaaagtgttcattagagaacatagtatgcagtcaagacgggcccaagccattatcaagaacttcccacatagcaagaaggcttggcaccacactctttgcttggcctaccttgtttgactcacctcataccctgtaaggtggatactgttagcatcgaagctgttttacagatgaagacactgagacacaaagaaatggagtaacagccaggttcacacagatagcaagttaagtgtggagcccagctttgaacccaggaatctgactacaaaaactgaactctacatagctattcctcttcagctgagaatgcagttacagaaaaaggccaaggtgccttcaaagttctgtagttagtgggttccaggtgtggctttgcatcagttacttgtgccacggacactttctcggttttagtttcttcatctatagccgtgtttcccaacagggagtgattgtaccctgccccccgccccggggcacatttggcaatatcaggatacattttggatggatatagtggaggtggggtgggggagcgctatacaaccagtgggcagaagccaaggatgctgctcaacattgtgcaatggatagcaacagggcccccaccacaaagaatgatctgaccccagtatcaacagcactgaggctgagaacatctgctttatggaggaggcttaagacccacacatgcaccccacatcactgactattctaagtgttccaggagctaacgtgcacaaaactcccgtggcagaaactattggctgaaactgcaaagttcccagggggactcgatcctcttgggtggatcttcttcgagtttacttcaatgacaagatccacgtcctccatgaaccccgtgttttcttcaaataaagtcctgcaggcccacgtggctgcctgggctgctggcagcagcctcttagctcccgctgcactgggttttctcttggaggttgcaccccttgccgtgactgtgtttcatctcgcctgttcctggcattgcctctgacagctggacttactgagagaccaggccccagatgaaaattctcagcacggccccaccatgctccctggcccaacccaggctggagtaagacagtcagacatttcttctctgcttagtattcatctttctttccccagttatctgtatttactttgaaaatcatttcctctgttttactcggtttgcctttgagcccaattgcctgctcagttccctgtcccttctgtttatttctacttctcatttttcccattgatcagatgccctggaaatatagcaggaacagtgtgttccctgtaatatttggttacacttaatatttctcagcaaaatgtagccttggaacaccaagcggtaaaaatccaggcctgctctgcttacactggacatcggcttcagcacaggctccgattcatttcggatctattccctccttaaaggggagtcacacccagcctacagcaggaaggtgcctcagcaggcgaactgccaagcatgtgcacagaaagctgtttcctcaaataagtgcacggctataacacagtaggtgcttgactgaataaagatacggcaccctgtgaaagtgccagatgaatatgctgtcgaatcccacaactcttccgtaaacacagtttttctagatcagcctttgccatcagggctactaatcctaattttccctgatgccactttatgattatgtgactcaaactgagaactaatgaaactctttcgtgccacagtcgtccttacaggcccctttggtgagcggatgaaagctatgcaacttttctccagaactgccttgcctgcctcacagaatattctgaatgttctgggcactaatgtggatgaaactcattacttaggaatgcatttgccagagactattggcttaaaccgcagtctctgaggggacccagtcctcctgggtggctcttctctgtgtttgcttcagtgatagaatcctctttctacatgaaccctgtgttttctttagaatacaatatttagttaaccctcagcagggtcccacccacgaaacccatggtttcaaacttaagaaccagtctctaccttcttggtttagaaaataccactaggaaataccgtgagtgaagcattgtttagttacggtaacagaaatcaacagcaacacaacaacacaaactcttactcaaacccatcaacagttcccacccaaagtttctctttgggcataaagatatattttcttgtgtggctttaaaaagccaggaatatgtatatgacaaagaaagacactgaaaagcaagagatgaggaaacaaattgaaaaccaaggtttttgaggaagcgtatcctcacctctcacctaacggaacagggttaataagtggcccatcagcactgagaaagttataggggcagctctgaactaaagtctcaaatatagtatgatgtgaacgtgaccatacacgccccaggtagagttctggcagcaacccgctagaccacagacccctcgcaacaaccagatctttgtcttggtcctgttctcttccactaggttgaagagtattcagttctgtgtatctgtatcactacccctaccccagccttctaaggaggtgggacacttcatctgctgagccagcaactagaccttcatcatgacgtgtggggagggggctgatggagctcccaagttttgctcagaaaaagggagtgggtaagggatgaatgggagagagaaccactcaaggtgaaaagagtggaggatgggaaacctgcatacagagacaggagcaagggaagccatggagaggatttcttaaattaaagctcccctttacttgggcttctagaagcctccatgtcatttaaagtgattagaactggagagagaaagacacaaagtggccagatagtcaaaatgtcaaattcttttgaactatgccgttatctgcaactgagatattttcacttctgtgctgcttggaggatgcagataaaatccacccactttatctggtaagaggtcccagtcctcttcatggctgaaaagaatcagcaccatacacacgtgtggatttctcttcctttcctctccatctgagcaaggcaggaactcatggtttaagcaagagaaagaaacaaagtgagaaatgaagaatcatgggcagtgtggggcaggtgtggagggatgcagtttatacacagagaagatttgcagacccaggacccagggtcaaggaagagcacgtctttccccagctcttctgcctctccactcaccatggcaggggagagattttccacagagacgagcccataatggaggcaataaccctctccagcgcaggactctgcacctccaaggcaccctttctgatcatctcagagggagaaaagccaagcccttttcttttcacatcctcctgtctttcatcccctctgtgccttgatttcaaagcctttctgaaacaaatgtgaagttgaaaggatagatttcaattattttattttgtaaaggttaaaaaggttcttgtaaatgactgatgcaaatactggaaacccagttaaaacaactggataccagatggcaaaggagagtggtttactgtaaagtgttatggagtaggagctcatttacaagaagcaattacacaaacagccctgagcatccaagatcccataaaagagtggctggggtgaaagtgcaggattggctgagcacgtatgatttccacatcccaatgtgaactgtgcaattgttatcttacctgttgcccttccactgggctacgattctaagtctaggctggcctgccaagaagcacagtcacagccctaaacagagatgcttgcactttctccatcacttagtggcctaggggagtttcctcataggagaactttaacaatacaaggagtgtaggcagctggcatcattgtattgaagcctggggaacttggtttttatctcaggtcaagagaacaggagaaaatccctttacaatctggatgccttttttctctcattataataaattgagaatgagcacaatacactttactgtccatgttcaatcctaggtatgctcttgcatgcatgtagacactgtatgcaaatcacaaaagcaaatcatgaagctgtagctgagaatttgacattgtagtttcttgctctacacacccatcaggtctgggctgacctggctgccctcctccatgttaaacctcctggtgcccatttcagtgccctgaggccaagtctctgcctccaagtgccatgacctccccaaggtcagccttctggtttatcttaccttggctagaccgggtaaacctttacatctggtaatcaacttgactgtgatctgtgctgggaagagaccatgcactcactccagaacacaatcacagggcaggtggtaacatgtgcttttggggaggctttctataaacccatacatatcccaggcattactcttttttatcagagccttttctggggggaaattacagtcaagaatgtaagtttcaccttgccaaggcagtgagaaaaatacttgtgtgcaggtgggacttccagggcctggaaatcacagtaaccattctcatggccagtcaagatattttgatcctggagaaagcaggattagaaaccagaccaccatactgatacaccctaggatgtcctgcagcccctggtccaacagagagggcctccctcaagacatactgaaatggagctggcagatcagaacctaatggaatacacctgaaaaaaagcatctgaccctcaaatgtttatcaattgattaatgaatacacaaatgcagtctaattgattaatgaatacacaaatgcagtctatcaatgcagtggaatagtatttagcaataaaggaaagtaggactattttatgctacaacatggataaatctggaaaatgtgatgctcgatgaaagaaatcagaaacaaaggatttgcatattatataattctgtgcatgtgaaatgtctagaataggccaacctatagaaaaaggaagtagatcaatgcttatcaggtgcaaggcagggatgggaatgaccgctcatagtatggggtctgtttcaaaggtgacaaaaatattctggaattaaataattgtggtcattgaacaactttgaaaatataccaaaaaacactggattatataaggataaatttatggaatgtgaattctatctcaataaatcaaaaagcatgggatgattctgcatcccagcagggaatgactcctactctcattttggggacaaccacagtagaatgctgtgtctcgtaagtttcacaaacaccttcctaaaatttttatggtagatttagcgctggagttaaagctgatttacatgagtatcttttcttcttctgaggagacacatccctgggtaatgtaaagccagattcaaattcctgttctatgttctgtgggagttgggggttgaggggtatcaaggaccctagtttgaagccagtcacagtttgctgaagttctgagcttcctcagcacaaagacccataatctaatttcaactagatctcctctgttctcagagcctgtggtgtcccctctatcctctccctcctctcccatctctctgagctccagtttgtgaggatctcaggagcttgtggaagtcatccctccttccttattttaccctcttccctaaggcaacaggctgagtccacgtcctcaacaagtgtggtcattcctatgatctgcctctcctcctgctttcaccaaacctcccaggcctattaagttgcccctgacctccttgcactgagatccatccactcatcccctccttcattcaactaatatgtactgagcgctggctatgtgctgggcactgtgccaggagctgggaatacagtggtggatggggcactcaaggtaaagctggcaatactcaaggaaaccaagccatcagatggaagtttccaccaatcagcccacaatgagcccttaagcccagcagtctgcactcctagaaggagaatacttagattacttcctttttctcactgtagttaaacttccaagggctctcttgccctcccagacacgtggtgaattccatcttcttgccatttccaatgggttggagccatgcggctagtccttccaatcccttgctgcagcagttatagaaaaggtcttgtgttgacatggccaagccccaagatcgaagcaacctgtattactaggttgtaactcagaagaaagttgcctcgaggagtttcttaaagctgtaacagactcagcctgagtgagaaataaacctttgtggtatcaagccactgagatggtggatgtgtttatttataacagcatgcccaggtttactctagctagtgcatccactgagaaaacaaggttctaagttgcatataagccctccagaatattttctggaccgttctcgcagaagagcaagtcatagaccacagcaatggtctgtaattaagaaggaaaagagaagagtgcagattgatcgtatttcatatcaaattgtgcttaaattatataaacaatcagttacataaatggaattgcaatggcaaatgttttgataatcaaagtctgtgccactggtcattcaaaatgtgtttctgtttctttaagtgcttacttgggggatgccagatgaattcgggggcttcttggagtgatttctcatcccagagatgtttttgtagctatactttggccctccaaatgttcacatttgatatacgccactcaaaaatagctaccaatggaaggcatgaccttgggctgacaatttatttaggaaccagcaaggccaggctgtcctatgtctttttaggttattctctgcgttgattccggtcaatagcctgttttaagaaaagcttaggccagatttaaaaaaaaagaaaatctgccttcccttgagtaaacacggtaacctgacagctccagtgggtaaataatgcactttttaaaagcctttccaaataggcctttatccagcaagctgcttttataagctaccactcttcctaatatctatttattcaaaacttcttaaaaaatgatagacatctattgaatctgaattttctggattttcttttttttttttaattttaaagaagaaatgtattttttcccttctggttagagaaaaagtttttcttgaaatatgatcctctcagataaataatggcaataaaagtaaatggaaagtgggaaagaacatggtttcttagtgcagtgtgcagcactttctaattggaaaaggctaaaagggagttttccttggaggcctcccatctgacttgagaccaagcaaaacagtgatttgcttatgagcattgaggtctctgtttcccttgttaaaagggaagctaagaatggaagaaatgtactaagttataaacctgtattatggcaatgatttgtgtggatatttcatacattatggtgagatatagaaattatagaatacaatgagcggtaaagacctttgaagtcaccactcaaccccaggtggaaaccgagtctctcactactgagtcttgctgaagatcacagccaccttcagcccacattttttactcttgctagcatagtactctgctcatgttgaaacactctatttttccacttaaaaagaaatctatccagcttagctgagtttttctggaattttaaggaatttatgcacctgtcacaggaaggtttgggtttgctgatggctttaaaagccagagctttggtagtttaggccctcctgaggtcctgaggtcctgttacctcatcagtcatcaaaaatggttattgttgctcttttcaagggtcttctcatttccttaataagaaataataattcagtaatgttttcataattactatgaaaatattgtattgtagataaaagcaagagcaagactggcctataacttaacagtagcagtatttctgcaagagtatgactgtcctgtgatttaacagtctcaccatttcctctgcctctctctttccttccctcccactcccattctcatttccttgctacttttgccttttcattttacatttttgttcatgtatgatatacatgcagataaagcacacagctcaagaaaacaacatgagcagcacccacaaaagcccactggggcagccataacaccatagatcgcttttcctgtttttcttttgatagaaatggaatcttctaatgtacagcttttgtgtctgacttctgtccctcacgcttatgctagtgagattcatctgttgtagcatgtattgttttttttttccattttaaaatccattccctccccatctggggtaaatttacctccatctttctgactggtactactcctcttctcctttgtgtcttagattttattgccctattctgacttattttctttgccgagtcagacatgtcatttggactagagcagtggagacagcacactgttcctgaaatgtgcaggtgaatacctctcctccaggatccacccaatggatacacctgcagctggccacatatgcaggcgatctatgatactatgaaaggccccgtctaaagtgcttttacaagagaggatgtcggcatctgtgatggttaattttatgtgtcaacttggctagggtatggtgcccagatatttggtcaaacgttattctagatgtttctgtgaagatttttttcgatgagattaacatttaaacaggcagactttgagtaaggcagattttcctccataatgggggtgggccttatccagtcacttgaagttcttaatagaaaaaagactgacctcacccaagcaagaaggaattctgccagcatattgcctttggatttaaactgcaatccttcttgggtttcctgcctaccaccctatcctgcagattttgcacttgctagcctctactgtcccatggaccaattccttcaaattaatctctcttttgtcctctctctacatatgcacatcctgttggttctatatctctgcagaactctgactaatacagcacttctacccactcccaagcccatggaagaccttgtttattggccaagacactctttccagatgagccttcagaatcctcctccactcagtcctccagatatccatggcctgtcaataagcaagttgaaacatccttgctatccttgcacgagagcaatggttctcaagagggagagggtgattttgcccgccaggggatgtttggcattgtccagagacatttctgttgtcacaaatgggggagagggagtgctgttggcttctagtgggaagagatcagagaagctgctaaacatcctataaggcacaggacagtctcccattaacaaagaattacccagccccaagtgtcagtagtacgaaggttgagaagcattgaattagagattcactcagactcaactattgaaagacaaacatctcttggatgagaggtatcttagtctctatcacagcaattctatatgatttagagagagctgcttctcagtaaataacctgagaaattattttgaaattctgacataatgtggatgtagcataaccttttattttaccctgtgtgtgtggagctattgcttttagccttgtcttctcttaattcctttcaaaattgagtctccttttacttttcatatacttgagcatggacactttctttctaacacaccaaaatctaggccacaaaatacttaccggagtcaacaaatccccttgaccaaacatgctatagatcatgcccaggacatgctacagatcctgggaaagaggagattggaggaaattgataaatggcagtttcctctgctctgccatcaacaataacaaaatgcgtcagaagagcagaataaagtagtcaatacggacttccctcactcctggcaaacaaagggctttctaacagaggttctcccagctcagcattcaccattggtttgggtaactgcataggaggtctccctaaagatgtgaagcatttagcacttggtagaggaaaccctgaccacgggcttgtgagatgaggcttatatctttcaaggatgtactgaaatgattgctacgagttttcataaaaactttcacctgctatattctctaaggcacagtacaaaaatgaagtcttcatagtagataatttgctggattaaaaaaacaaattttaagtacaatgtaagttaataatttaatgtattcatgacataggacaggcaatgtatgcagaaaagaggtgtaagttaggggagagtgtaaattaatgtttcattaatatggaattttactgtattttagagcacagtgttaatgcccaataaccagagtggaaagaaatgggtaattcttttcatagtgaaaaattttcataagaaaactatgtgaattttctctggagacactaaaggcagagagaaatgaaataagaataaatcatcttggaaattcattaatgttgctgcagaatatcagaaaaccaacatgagaaactgacacattccaattattataattacattggctgtattagagcagttctttaatcatgttgccaatgagaagaaagttgtttacttttcagtttggtagtttcagaactgtcagtgattagctaaataaataaatatgtaagcaaattaattttatctcttcctattatagttaagcagctggtcaattatcttcaataagttttctttctaaaagccacacataagaaaggaaggtcaacagatccagcattttggcttgaatttcaagacccggttggcagtatttcagatgtccttaagccttgatgaccaagatacctaatgaatgaagcatagcatagcagagctcttggttttgaatcacaattgcgttgcacgtggttcatgggaaaaaattaaaatatcattccctttttcccaacatatgcctaagaatgtcctaaaattgtgcagctgcttcgtgctccagtaatacacatgataataatggtgaaatgaagcataggtaggaaggtaagatgaagctgaagagacagaacaatgtgtctggatgttggattatctatggactcagctgatccatggactaagaaacaaacaatcaggaagtcacatcagaagatctcagcagatacacatgcatgtggttaaggcgaggtcgggatctgggctgccgcagatgcagttgagaagggctggccgtgctggttggcttctgctttttgtcatacaataccacagcttgaattaaactcatcttttgcagtgggtctgatgaaccttgcttattggcaaattggcataggctggcctgctcctgttgtattcaccatttccaggaagtcaacatgaaattcattagactgttttgcgtagccatgaagtgtgttcccacactagccagtgttatttccccaaaatgaccaacatgctctggtgacccaactgggagcagtgccctttgtcgtattaggtgcttcacgctttggattggcacagcactcccttgatagcctaatttcattcaagtgtatccctaaaattcatcaagtgagttaatgttgtggccaagatttgacttaaactctagaggagtcagatctggcttcagtttttcctcttcgacctccaacatgtccttgctcaggttacctaaccctgtgtctagttccctcatccattacagggcatgatactagaatattgattgagtacttagtgtgtgctgggtcctattgttagtaaatgcagtacgtcatctaattcttataacagcaaccctgcaagacaagtaccattatcacgccattttatagataaagaaacagaggtccagcaccccagtggaaagtggcagagcaggcactggtagccaggaggtctggccaaggcctgtgctctcacaagtgtctgacactgcccctctctaatttcagtaccgctttgcttctcaccaggaaattattttgactcacaccagcatctgcctcacagtattattctgaggaggagataagccagtgcacacagtgcacagctaacgaattcacatgtggattcggcaaatgttgatggatggccccttgtgtgtcaggcagcgttctaggtcctgagtatgtaagacgatcagagtgattgccctcctggagctcgtagcctagaaataagacagaccacagccagataaatatgtctttaataacacatcagtagtgccgcgaagcaaaagaaagcaggggcagaaagtgacagtgttgggggaggagagggagcccagatggataggggaacagaggatgcttccagtagagagaagaactctgtgaagacattacctttgagccaggccctgactgacagggaacgaagccatgtgaagatctgggggacattattttttatttgtataataaaattaattatgtactaatttcttagtttaaccacagagagttcttgtcctcctccccaaccaagggcataatttcttactctttctcaaaactctaacaacaagagaagaaaatctgaaaatgcagatggaaaagaaaaaaaaaaagctcttctgaaaggtaagaagaggctagttgccacgaactctggagctatcgtgaatggaaagagaacatttccatctcccattgatcactataattcacaaattctcctaaaaaacagaaaccacagttgactatggttttgttggtttcacttaattccctgacccctgactccttgtgtagctaaaagcatgtcataatcacggtaaattctacctctctttattccattagagggaacccaggccatttcaaacaccatcttcccatccaatcttgattttacaatgcttttcactgaagattagagttaatgcttttctaagaggtttgtcacaaaagggagcttaattggggctcattttttccatccgcccagttgttccataggcttacttttggaaagtgtgtctatcatgaatgattcatgttctacaggtgaggattatgagtttagagaaccaagtcacccaggaaagggaaagctaccttagcttctgggagatagaaccatagcactcagtgcagtgggttgaagagtgttcccctaaaagatgtgtacatgtcctcacctccgatgcctgtgaatgtgaccttgtttggaaatcaggtctttgaagatgtaattaaggtaaggagctcaggataaaatcatcctggattaggatgggctctgaacctaatcacaagcatccttcgaagagaaaggagagggaggtttgagacacagagacacaaatgataaagccatgtgaagacaaaggcagagatggagtcattcagcatcaagtcaaggattgccaatgaatgccaagcgatgccatgcaatgccaaggattgccagcagacaccagaagctcagagagatgcacgaaacagattctccccagagccttcaggagccaaccctgctgactcattgatttcagatctctggccttcacagttgtgacagagtaagtctctgttgtttgaagatagcaactttgtaacattttgatacagcagccctagggatctaatgcacttggtttgaatctttaacatgaaatgaaagaataatagttaagggtcatttaatttcttggagtagtgagggatgtgacccagtgccagataggaatgtaagtttttattgttttgttttgttttgttttgagatggagtctagctctgtcaccagggtggggtgcaatggcgcggtctcggctcattgcaacctctgcctccgcttcaagcaattctcctgcctcagcctcccgagtagctgggactacaggggcccgccaccgtgcctggctaatttttttttttttgcatttttagtatagacggggtttcaccaacctggccacgctggtcttgaactcctgacttcgtgatacacccacctcggcctcccaaagtgctgggattaggaatataaattttatatggagtttactgggagagaaaatggctgcagtggctactgtttgtgtttacatagtaccccatctgctttaacctctcttctagagacagacccaggtcacagtcacagagacccacagtctcagtgggaagctgagatcacaaccaaggctctacgttctcagtgggagcacagttggtgccggatgtggtccctcatgctgtggccaccattctgtgcattgcagggccaacagcgctcctgtccctgccactaaaatatcggtgcttggcccccagtcattgtgacagatgaaaacaccaagtattttccagtgtcccgtagggggagctgaatggccctggttgagagcactggcagatgaacctcagcattaacgtctctgggctacgatgccctgatggattcgtgatcacagtaaaaattacttactgatggcaaaactagaatgtgtggaaatctgctggatataacccagtttacctctgggaccctctatcattatggttaaaattaagattgaccaaatcccttctgactgaccattgtactccacgtgttgcgacattcaattatcttacaagcaaagctcactctctgatgacccagtccatctcctaagggtgactctgaagattctgtcacaatccctcatgttccaatgtacagcttcgctcttagagagtgatcttacttctaacttccttgaggatctctaatttttctggagtcagagaaatactggagaggcgagagatgagacttgaaatactggagaggcaagagatgagacttgaacctggagccaagaaccaggtcccagaggacttgctctgcactgtgccatgaattggcccttctttcacagccttgaggattcagagaaagatgcggatcagggtgccatgaatgggtacatgtggccatgaggagacaggattggaatctacaaagatctgccgggagtaagaggtagatgtaaagaccgagacaactggccaaggatgggaccaagatagtagcaatgaaaacaaaaggtagagaaaatagtcaaaggataacaaaaaggtagtcctgaaagcatgcagacccactggacatagagagtacaggagggaagagatcaaggatgtctcattaaattaaactttctagataatttaaattggaacacagctaaatttctttgatactttggagaggcttcctctaaacatcttgagtgtgtttaaagaacactcaagataactcatgttatctcatggtgagataacatcccaggcaatgatgcagattaagcaattcaggaatttaagggctccaaccattaactactttagaatatcagctaaggaacacattctggaagctttatgttctattatattaattatccccccaaggagcaaaaagcgttttaaaaattagttaaatgaatctcaatgttctttcctaaggcaaaaggtaaaaaacatatatcaacataaggaaagtgcacactttcagcagctaagaggcctcagtagcctacattacaagcctgcctccttgaagctcaaaattagtgaagccacacaaggtacaaggctaattcactatggatgaaataacgggcagagaaagtggaatggtaggctcttgagcacctaccataaagcatccaggtgaaataattgaaaggaagccctcttttttacactgcacacactgtgaaatgcgaggtgcggaaagttgattgtccttaatagggaagtatcagcttcctccctacagagagtttagaagaaagagaagcacagaactgcagagcttgccttctacctaaaaactggtgcttagaacaatggtctccagctgcatccatgttgctacaaagggcattttctttttcatggctgcgtagtattccgtggtgtgtgtatctatatagacatatatatcattattatataaagacataggtatcacgaatatacacatatatgtgatatgtgtgtgtgtgtgtgtgtatgtaacaatttctttatccaatctgccattgatgagcatctgtgttgattttatgtctgtgctattgtgaatagtattgtgataaacatatgagtggaggtgtctttttggtaggaagccattatcctaagtgaatcaacacagaaacaggaacccaaatgtcaactaaataccacatgttctcataagtgggagctgcacattgagaacaataaacactggagattccaaaaggtaggcggaagggtgggggaagtgttgaaaactaactattggacactgtttgctacctgagtgataggatcattagaaacccaaacttcagcattatgcagtatactcatgtagcaaacctgagcaagcactcacagaatctaacattaaaaatcaaataaaatacattaaaatgagaaaaaaatttaaaaattggtactgacatgtccagaatcttaggagaaagtagaaatttaaaaaataacaccacaaatatcagtgtttttaaagtttcaaacatttctgtatttaacaagtattggtgccttgaaattgagtttaaagaagacagttcttgatttatgctcttgtgggcattaggatggggaaaaaccccttcagagtaccatgacgagattttgaattatgcaaaggtaaagaaaaggtcccactaatgtagagatatttggagacttagttctaatgaactgaaagagaggtttgaggggagatgacttaggagtgaggagaggggaagcctagagaagcaggtgcagagcttctacccggatcctgggctggattcagcttccaatatgccttgtttgtccctgtagcattaggacatattgaaagcttcctcacttaagaatatggatattttacatagagaaattgattttacactccttttgcaaaccctgaaggtctggccatgccagtttctcattctcacaagtcagcaagagcaggtatggaggagagaatcagatgacctctccagctttctactttgtacatgaccttgtgagtatttctgcctaagagtcacttaagaatacagatattttacttagagaaattgattgtacactcttttgcaaaccctgaaggtctggccatgccaggctcttattctcacaagttaccaagaccaggtatggaggagagaatcaggtgacctctccagctggcctcggtgccacctcactgccacctccctgtggtcacacacagcctgctccactcattcacaggcctgggctggtttgcatttaccttggccccatggactagagagaagatgaccagctgtcaacatagctgttgagggacaatctctgggcactggcagaactacgagtgacctctgtgtccaaacagagaatgcctctggggaggagaccatttgtcccctacataatgagctccagtgtaaaatccagcatggctcaggtatgctgagcgttggaaactttggaagcttctggaaacagtaggctagaaatgagcactgacaactcaaaatgcgtacctgcaagggaagctgagtgagtttctccaagtgttgtcagggggatgcctgcggccacatggtagccagacagagaaaagaacagggaagacagcacacacggggaccacagaaaatactgtatgtgttctgggggtccgagtgggagtttaaaactgtcattcaggtgggaggcttaagttcttgaaatttaaatattagaataaaggcaatgcctggacataccagatgcatattaaaagttttctaaactatacatatttttaacctagaaattctacttttagtatttttatcctaaaaaagttcatggatgtgtatagagattgtattgaaatatattattttaatacaattatataaataatatatcataaaattatgcatgatatataatataaattataaaatgattattattgaataacaattatataagtataatgttaattgtaacttataatgacaaagaactggcaactcttaggatctgcaactgaagaacattgtttcaataaattgtaacatccatacaacaaatttcaagtagccactaaaatactaccaggaagttatttaaggttatttcaaagcatgttacaaaaataatatgcatggtataatgccatttttatttaatatataaacacacatagggaaatatttaagtttatacattatattagtttcctggggctcctggaaccattttctgcaaatattgtggcttaaaacaacagagttaattttctgacagttatgaggacaggagtttagcagtttcactgggccaaaatcaaagtatgggcagggctgcactctctctgaaggctctaggagataacccttccttgcctcttccagcttctgtggttctggcgtccttggcttgtagctgcatcactccaatctctgcctctgtctcttcgtgtgtctgatctcccttagtctctctcttataaggacccttgtgcttggatttaatacccaccaggaaaatccctcatgtcaaaatcattaacttcatcacatctgtaagtcgcttttacattgtaaggtcacatttataggtttcaaggactcagacctgttatttttggagcatcattatttcatctgctgttttcctaatcattaaaagatatgtttttcttatgtctttctgttctttcttagagtaagtattgggtaactttagtaagggggatttattttaagtagattataccagacaaagtatgaatttctactttgtacacgacctcgtatttctgcctaagagccaaaaaagaaataaacaaaagtaccaacatgaaaactgtattttccctttagagtattaaaaaccttgttcaatattcaagactttaaactatgtttaaaaaatagaggcatacgatatgattgatttttatcaaatactaggttggatattatagaacaaatatataatttagaaaaatccaagaaaaaaacagagatgaagatgccctaacagatgactctacctgccaaaaaaaggaggagagatgtgtataatgtgcaagaaaaaaagtatctatttgataggtaagtgtgctttcaaattctgaaaggtctttaatattaggaaaaagatttttaccaaaaatggaattttccactaaaaaacaggaactaaaataagtatccatttcaattctgaaaagtgaatgatgaagaaggcaagtcagaaattcattttagatgacgaatatgttacatttccaaaaagaaggtaagacactagaacagaggaaggtaaaagaggaagtccccacttgtttccttattacgtgttagtttctgagttagatgtaaggggagatatatgttttggacaggtttcttgtcctcaaaaatgtgtagttcagtaagaaagatatgattaagccgtgttgaggtgaagcgctatgcaaatgcaatcagtgacaagagaggcacaaaccagttcctccagaactgggggtggccaagcttccccttgaaatgcagggtttgcaggatagatgaagctgagtgaagaagacaggtgagtagtccatttctgaaaaaactggaaggaattgagatggaaaagtaataatgtaatacctaacatttatccagtcatatgccagatatggggctaagattttttttttttaatccattatcagggagaaaaaacgtttcctctattctcttaagtttggtaactgagagcctgtgaattaaactaacaaaagatagattaacagggggaagggtacacaatttttcttgatatttacatgcacaagagttcccagaaaaagagtgaaactcaaagaagcagactcaggggcttatacagccgttcaacaaagggaaaagagtttgggtctcaaggtatgataaatagtggggaagtgactaggaaatccagtgactcagggaagataagggttattttagtaaggtcgcttgtgcaaacacatgttggcatcaactccctttcttcaatgaaaagagtcactcttccctccttgtgtaggaggtgaggtcctcctcaaagagaaactaaaactgtatgccttgtctttaggctgttaatggtgggttgaggaactcttcctgcacctgctgattctcaactgcctttagccccaaataatctttatgccaaagtggcatagtttagagtggcatcttctgatccccatcacaataaacaggtgtaatactgatacgactatgagacaggcataattgttgcgtcttttcttaggtggggaaactgaggatcttatgtcctagccagcatgcctgacaaagaggtaggtgctcatgttgtcagaaaaggagggcaagtggtgttggtgtcgctcaggcaatttcaatatgacaaactggaaaacttctaaatgcaccgtcctcacttgtttcaagtttcagaggaaccaggtggatcccccattctttaactggttcctttttcctttcaagttcaaaaacactcaaggaatactttaataaatcaataaagtgaacacagcaagtgaggaatggcaagaaacaagagaaaatgttcaagaggaccgtaacgatgagaggaaattaaagtaagtttactcagatgctttcatgtaaccgcacttattaaaaaagaagaaaaaaagtcttataaagttgtataaaaatagagtagcagaataataatagccctaactataatttctgatactatgtagactggggaaaaacataacccaatagcctaaggagaaaagaaagaaaatatgtttgctcaaagaaaacaaacacagacatataaacctacacccctgatggctgaacttcatagaactaagaagtcaataggaagaaagtgcagacaagcaggaagctcattagattagaaatcaagttcatgttctagcactgatggccagctgaccagggcaattcacaagcagttcaagttcagggaccaaagcgcccctgagtgcctccattggattctgcacagccaaaaagacgcttgaaaacatcaagccctgtcaccagtaccttctataagccttgagagaggtgtgatgatataacagggaatcagagaagcctaaacctgtacctgctttgggaaacccatgtaatgccttcgcctgattcattattatttgagaacctacaaggcccctgtgttcacaactctaggaagatgcaagactctaggtatcatggctcttgcctttagaagcattttgctagttttctattgctctgtagcacgcttccacacactcagcagctttaaacaatccctttatctgttcacagctctgtagattagaagtctgtgactgggttctccatagtgtctcaggaggctgacattaaggtgttagccaactgggttttcctctggagactgggggaaaatctgttttcacacttattcagggtgttgtcagaattcatttctttgaggctgtaggacggacattcccactgcctttcttgttgtccgctgtgggccaccctcagcctgtagaggccacccacattccttactacacagccccctccatttctaaaacaagcaatcaagaagtctccctcatgttgaatgtctgtcacgctgtgaatctctctcatgaggaagatcccagcagctgatctgagacctgaattacatctacagaatcccttgacaggagcggctagatatgtgctgggccacacaccagcaggcagaaatcgtgggagccgtattgaaattctgcttgccataagcatcggaaaactatttactaagtgttgaataaatgagaaaagaaatgaaaacttctggcccctcactggaattatctcctcaagtgagaggcagcatagctttgctgtaatcctgtccatcacctgcaaagagcccgtcctcatgttaatcacctgttcgttgctcacggcaactctgtaaggcaagtccaagggcaaggcttatgattcctgctctccagaactctgatcccttaacttcttgcccagtgctcttttcacgacaagaaattacagtttctttaaggttaccttggacaaactctttggtgacattgtaacaacatgaagaagagacacaggagagcatggaaccccgcagaagacccatgaaccagggccgcttggggctgtgggcactggctcctctgctgtaactgagtccttgccaagaacccacttctgtgatctggcaaggggcgggagacctcagcagaagatttaaaaccagatgaatcatatcactggtagtcacacagtgggcagttgtcactggtgaaatgactccgtaggtggccgcagcccaattatctgctaggtatggaggttgcatcccaaatcctgtatggagcggcagtcctaaaatgagtggctggtcctttgccattttcccgtcgcttgaagctgattgaggcatcagtgaacgaggaggagggtgggaaagcagagccttccagggtccaagtctgagcattgatgggggaggctgggctgggtgacagaatcttgatggcagacctcagtatcacaaagggtaaggtgcttggaggtgaaatggcctgaagtgggaaaagaggcagatgctgagaggaggagagtccatgcaaaactgacaggggctcttctgatgggtctcactgctccaggaatcctggtcttcatgctttctaggcatcctgttgagtcctgaaagaggagcccagaccaaccaggagctcattcaccctggtttgagtctgggtacctctatctcttaaccagctgggcactcttggcttagctacttaacatctagtgccttgttttcctcatcagttgaatgctggaagttgagctctctgatttatggagccccttctggctatacattcttatctcatgaggacattttgtgatctggactatattaaagagccactctctaggattaataacagtacacagcagccttttcatattcttttctttttctacagttactgcccaatcagcactataaaatattcaaatcttaaaaaataattcattgaatatgtcttcttttagcaccagctgtaacaaaactacatacatcagtagttagctgcttgcatgtgaagcaacagctacatgcacatgggaataagctacaaaatgttattttaataagatgctgtccacccaaacaaactgaatttgaaatgtggcaccaaacttgctatctggctcattcaaaaatatttcatggtcaaccatgtaaatgataaccttcaaaaaacatttatgaagtaatcaacatgggaagacagaaagtcaggctagaactttattacctgtgttttgttggaggtatctaactgttcatagttcactgtgaattctttggattagatagttctttggaagaggaagatagtcctctcccaaacagatagtcctttggaagaggaatctttggaaggtgatttgtcacattatttgaaaagagcattgtggctgattcagagccgccatttccttaggtatcagctgaatgaatgacatttttcagcttaatcaggctaaaactcttggagtcatctttgactcttttcttcaacttcctgcattcttcttggcgctgtcttcaaaagataaccacaatccaaccacctctcaccacctcctgctccagccatggtctgagccaacaaggtctctccctgatgagcatgagcccccaaaaagttctccctgcctctaatttggctcctcacggtctattcccaacacatcagctacagtgttgatcacttatgtcggttcatgtcactcttctgcccagatcctttggtggttctttttacacagaatagcagtcaaagtttatagagagtccctcatttcctctacaaccttctctgtcctctctcccactggacaccagttgagcctgtgcagtccagccaagctcctgggtgctggggtgtcccctcatcttggaatgctcttctctgatgctctcttggccaactacttcaccccttcaagtgtttgctccaatttcatctttattaaatttgcatagatttagggggtacagtgaaggttagttcatggatatattgcttagtggagaagtctgggctttctgtgtagccatcccctaaagagtgtacaataaatgtccattgtacccattgagtaacttatcatccctcacccccctctcagcccctcacctttctgagtccccaatgtctattattccactctctttgtcatctctgtaaggcttcacctgatctttctgtgtaatactgcaacttgtccctcaccccccagaaacccaaaccctccttatcctgatcttctcttgttcatagcatttagcaacttcagtatgatgcattcagtgataatgaatgtttaatttctatctcctgctagaatgcaagctctatgagggaagggatctatgttttgttttctgatgcatcctaaacacctagaagaatgccagataaatgaaagcatccaaatgaaatttcatctcacactcatgtcggttgaaaaagtcaaattgaacaataaatcttgattgactacgataaactaaaatgtgttcatttaggcttttttctatgattcatcttctaaattgcctggcaatgatcgaggaatgccctcagtcaagaaaatgggattttagctaatctctgaaatacatttgtaccgattgcatcaaaaatgcacatatgctacctctcacattttaaaaatatagtagcctcccgatcaccagataagcactttatagaccacaatgatcccttacctcttccctaaaatttagatgtaaaaatattttggatacaacccatatactactacaatttaaggctacctcactgattcgtcccaattctagaagaaacagacgacccattcaaactaagatgatctaaggatgaaatgggatgggccaagtatatttctcaaaggagaaacacagcttgcttcgagtgactccacagaatgggagctgaagaaatgaagcctgacttcactttccaccccctctccatttcctgctgggcccaactgaggactagataacaggaaggccctttgaggcagtcctcagagattatccccctagggcagagagcagcatggagaaggatggagaagcaggctgcaggggcaagggaagataagcacccaaaaaaagctctgatctatagtaagggactatgtgtatcaaccctacaggtggatttcagaattttaaatacattttccattgcaacacagtggacatatacttaagtgtttttaataatccacttctaaaaaccgccacttgccacttgcaaaaagcaaacgaataaaaattcccattctattctattctattctattctattctattctattctattctattctattctattctattctattctattctattctattctattctttatctttctatgctggttgcaacccattaaactgatttcacaacccacagtttaaacatctctggctaaggccaatccctccatttaaaagataagatcacttagatcttacagggttaactggcttgtccaaatttaaagtatatgtaatcattggaatgacgtgggtgtgtacactcattgtaaagaaaaaacttatttcatctatccaaatgttctcttccaaaccacatgcatatcagcatgttttgaaaggattttagtattgtaggtgtcaagaaagcctctatttaaccatcagtaaaataaatagtcctcaccatactgtgaaagggggacaacttcagtacagtggagagctgaggtcatgccctcccatacaggaagagctctttggaatcgagggctcacttattcaggaaggatgacctcctgtgtgtatgtctttcacccccaggtaacacaggtatttatgatgcctcatgaagcatacttgctggacactaggatggtggctaatgacagtttctctgtgcaacaaggtagagaactatgagacagccaaggtcccagcctggcatatacattgcacagtcgcacaggaaggcactctgctctgaaatatttcatcctggagaagttggctttgatgactttcaaaagtagcagaactcactggttctctctttggcaggagtttgtgcatttcactcatttcaagtcaggactaatagttctaatgattttgaagggaacctaaatgattcctttatgcctggctgggattggccagggttccacttacaacccacaacatgctcacacattccatagaaaaataaatactgctgtaaccacgttggtgccacgccagtgcaaatggccattttcttaagtactcattttaaaagcaactttgttatttcagcatgtgctttgaaagctggcttttctatctctggtgtgatgttttcattgtagggacaaaagtaaaacattaactctttcaacagtttgagggagggtggatatttaatacaaaaaccaaaaaaaaaaaaacgtaatgggggaaaatgcatcactcctgctttcttggatctctgctggagtttccacttgtgtgtgactccttcaccttccaccaaccacccctttggttagactgggttgtggttccttcaaacgtcttgccgaaacttctggacagctatcaactgaagaactctgtcctggtcagaagcttcaacatcctccgcccgtgatgcttttctgggtccaacgaccctgcaataattttcttcctgtgtaccagagtttacgaagtcctcctgcatgtgaggccctgggcgcaggtgtgggcatgtgcaggtgtgttcatgtcaactgcagagatcctgagggcaagacgaagaaaacacagccagtcctttcaggaatttataattcagatgctgaggtggaacagaacagatgaaaagcaaaagcacaatggagggcagttatgattaaatggatttcagagggtcatgatggtgccaggctatcttgggtctcctcacactcaacatcaggcccctccacctcctgctgactttcatgcatcaatgttaggctaacatgagagatgcttacaaatttgcttcatgatcactgtagaaatgagcatggttgttagcaacagctgctgtgggtgtgcaggtcatggcgtctctcagagctgggaatgcccaatgaatgcactcccctctttcacctgaccacggatggtcacctgatggtatttggaaagtaatgagagatctttccaccacgacgttttgtgagaaatggtgtatttactttttcaaatgttattgtttaatcttcgaacagctttagatttacagggaagttgaaaagacggtataaagagttcctataggttccatattcagtttccctagtgttaacatcttacattgctatgtacatgtgttacagctaatgaaccaatattaatacactatcgtaagtggaagtccatacttcacatttccctggagttacctcttgtcctttttctggcatcccctcaggacaccacttcacattcagtcatcacatctccttaagctcctcttggccgtgatgccatgacagtttcctagaccctgtactaagtttcctagactgagtactggtcagatattttgtaaaatgcctgtcaatttagatttgtccaatctttattcttgtagctagactagatgatgtatacacatttgggaatgtaagcataaatgtttcctacataggccaaacgtgttgttttgaaagctatgtatgctctatgaagtttgggcactgaaaaccaatagatgctccacagggaacacgttgattacatgggacatgttcatgcaaagagtgactcacagtaaattacactgcatgtggtttctcagactcagatggaaagcagacttcagttaccctaggtacatctcaaagtttccctgtttcagtacactaaataaataagcatagtgttagctgtatatattgttcagttataggttagttatctgctgtaattaacaacctaaaacattcagtgacttaataaaatgaaaatgtatttctctctcataccataaacacaggatttctaggtgggggtattctctttacagtggtgtcatggcattccagctttttctaaacctattatctcccaaagctttctggtgctcatttgtattagttaggggacaagagaataaagcaggcatgaagagctcagttggagatttttcaggtcagatctagaagtggcatgaattacttctgcccatgtttcattggccagtactcagtcacctgacccaccctgttgcaagagagactgggaaatgtggtctagctattgtaggagaaggagaaagaaagagactttgtgaacacatagcagcctctgccactctatgaatttatgtcataccaagtttccagaagattaaaaacatgataaaatgacttggaagatgcatgctattcttttcgcacacataccccctgtttagatttggtagtcttctctaaggatgctgcagagggtagcctctacataggcacttccacaacactggtatttctttaaaagcaaaagtctgtcctttaaagcaatgtagagggagaaggataaagaggtagaaactggggagaattatcccagcaaacaaaatatgccttgcaccaaatatatttacaattattaaaccagatgattagaagtaatagcttatcacctccaccaatgggaacatggaccaaccaaccggagactcataaaaggaaggggaacatgaaagcataatctcaatccagagtcaaattccaatatatacctttctagagaaaaatgaacagtctttctttctcaaataagactactctttcattttctaaataaccttcctcaatctgagctatagtatgtctggatgctaattgtctagtagtctagacagtgatgatattatgaccaagttatgcacagataatcactgtgtcactgtttccaaagctgcctacacgtattgcttcactggacacacttggcatgtgtgattattctcctgatatttattttcaccatgtaagtagagaatgcttacttaatcaaaccatccagtgaactgagcagtttttttataattcaaatgcaatatgagagtcttgaagctaagaaaaaaattatgttaatgtagcccatacttttctgtattctggggcaaggaaccctgtggcattttgctcgcttcattcgctagggatgcatcttgcccaggtccctccagtattacctctgcaaatcattcctacccagatgggttggcttaaccaaaaccattctgatcaaggagttccaggaatctctccggagaggtcttttctgcagcctggtccaatgcacaggttacaataaagtggatgactatatggttctctggctttttcaaaatgacacatttgtttttaaaaaccaccatcttaacgaagcatatgggcaacgatgtcatgacacccttaaccccacccgaaggagggagactgaaatcaatgcagaaatgaaaaacagtatggtttggaaagtaggaggatgttccagacgcagtggataacaaagtttatttctggcaaggaaagagaaaatgatcaaagggatctggaagaagtttgtttggccaaggaaaaggcatagacgggagtaacaggcagacaatcgagcttggcaagagggtgggtgttgatacagcatgcctttaaggacagctccaaggctctagtgtgcgttttatatactatttccactattataatgacccctggagtcactgtattgcctaaggagactcgttaaatcgcagtctgtggctggaggggtaacaaatggaatcttccctcactcctgtgataccagtctccttggtctctcaccagacacggaaatgacacacaacacatgaatttaaaattcacctgtgcagcttctaagctcaggcgtcttccagaactggtgaagcaggcccaaaggggaaggcggtcaggtagggagactggaagaggattttatgaacctactggaaggtgtgggtgcagttcaccagtaagaagtttgctttgctttataattccgagtaaagccagttcttcccaaaggtggtgggttgaattgtggccacctctagaagatatgtggcctcagagcctgtgaatgtgaccttatttggaagaagaaactgtgcacatgtaattaagttaacgatatcaagataacgtcatcctggatttagggtgggccctaaatccaatgctaggtgtccttataagaagatgacagagagagatttgacatgcagagattcagggatatgtgacatgggaggcagagaacagggtgatgcagcttcaagccaaagtatggcaatgattgccaacagccacccaaagccaggatgaggcaaggaatagattcttcagcacctccagaaggaaacaactggcacctggattttggtgatctccagaactgtaagaaaactaacttctgttgttagaagccaccaaatgcatagtaatttattacagaaccagagctagaaaactaatacaccaaacaagaaacactgaatcatgatcctatccctgtgctcatcccgccctttactcagagtattttaattgtagtaaaatatatataacataaaactcaccatcttggctattttaaagcctacagttcagtggcattaagtctactaactgctgtacaaccatcactaccatccatctccagaactttatcatcttcccaaacagaaactttgtccccatgaaacactaactccccactttccttcccctcagcccctgggcatccacggttctattttctgtcttataaatctgactaatctaggtgcctcataaaagtggtgcattcagtatttgtccttgtgcatctggcttcttctttccacttgggcaacgtgtcctcaaggctcagccatgtggtaacatgtgccagcacttcattcctttctatggctgaataatactccattgtatggatagaccacattttacttatccattcctctgtcagccaatgctagggttccttccatcttttggctcttatggataatgctgctgtaacacaggtatacagatatctcctcattctcaaaatatttattgttgacatctcttgaactgcttcatctcttccttccctctagctggaatgatccctggtccaggttccctcttatcttcctaaaacctccaccctttcaccgatttttatactttccaccctcagcaatgcccttttcaggatagctcttggcagtgaggactgcagagtgtcggtgtcaatatttaagtgggatttggggacagaagccaatggctggtggaggcaggcagtgagcaggggctaggggattttgttgatgatgaatttacacagcaaacacaatgtttctgctaataaatgaaattacagatcaataaaaatagctaagtcttttaaagggggctagtcctcacattttatataagaccctgccatggtttggctgcgtccccacccaaatctcatcttgaattgtagctatcatgactcccatgtgttgttggagggatgtggtgggagataattgaatcatggggtggtttcccccatactattctcatggtagtaagtctcacgagatctgatgtttttgtataaggggtctccccttttgcttggctctcattttctctcctgtcaccctgtgaagagatgccttccgccatgattgtgagacctccccagccatatggaactatgagtccattaaatttcttgttctttataattacccactcttgggtatgtctttattagcagtgtgaaaacagactaaaacagacccagaaagcatcaactgcccatgtcaaagactattaccactacctttcctgaaggaggcctgagtggtcttacagtgttacaagaggcttaagcttgatgcttcccctccatccatcatgtgtatcccaagtcaaagataaccatacaatgtatcatccaataaatgaggatacttttgagagtgagagtggagaggtgtacagttatccccaaagacaactagcccaaactggggattgtctgggcaaagagatgtgtgctcacctgccaaggctcacttctacacctcaccccgagacccttgtccctgcctgaaggactcatgcagcatttaggtttcctcaacctgggaattcacaaataggataccatatctccaaacatgtatttagtgacataaaatcccaagctattaagtaacatgagataaacattgtgcccaagctaaggatgtataatgtgaaatgtactctaattatgcattcttcctggctttttcctatgaaaatgacagaaatagctaatgtgagtcaacatacctataaaaaataatattgttcattatattacttgtcaagaatcaaaaattgttttattagcctattgtatgttcttctccttgtggcatttttattttgggagaaactagtttttgctggcctgaggaacaatctcacacaaatagtacgagtattctctgctaggaatagcaaacacttacctctgaaggggaaaaattctagcttctatttatttatatttgttttttcccctcaacaattgctgttctctataatttaaatgtctgcaaaaatagtagttatataaacattaatgcattaaaagctatcatttcaatgtagcgtgcaaatcctggaagctgaacattaaggaatcatgagattttccctctaagcaaggggagggacttcgcaatctttttatccctaaaatgtatcctttgaagcttctcaagttcacattgttaagcgggcctgaattatcatcagcattgcattttagtaaatgctcattttccatctgcctctgatcagatgcacctttccttacctgtgacagacttgattcttttatttctatattttatttcagtgttaagtataggatttttctttccctttaaacaccaatatttctttttctaaccataatataatacatacatgtaacccagcaagcctggatttgaaaaaaatcactcaattatctcattggctttcataaaatcatagctatgtgtccacagtggggaaaaaaacctcccaggaaagctcattaaattatgataagactgatataattccaaaggatgttggcccaacagaagaaaaagacaactggagatgtaggggttggggtggtaaggaaattgcaaaagccaacgaacagctaagattggtacctgtgagcatcaggacccccacctggagcagagatctctcatatgtctgcctgaatctagaattagcaacagctcacaggctggccttgcactgaagaatgaaatttcagggatttcctccctgaaatccttggacttacatgaaacttcaaatctttaggatggggtcttctgagacttccaaatgctctcatctcctattccccaagagctgcaatgcatttaaggaactttttacctcctgcatagtaagcccttgaacccatgtgactgaacccacggcccttgtaactataacaattatagtaaccattcatgctacctgcattcattgagctcctaccatgtgtaagacactgtgctggacacaatcctttacatgttgaagacatggcaacaataaccagagaacctaaggatagaggggagagtgaggcagcatgtggaatgagtggcagggagggctagttttgctcagagaggtggaaagagcttcgtagaaaagctaccctttgagttggaccttaaaggatgagcaacaaagcagctggcatagaaggcaagtaggcaaaggaatgtggaagaacatgccacccatcctgatggaaagcctgaaggtctaatccttgaactactcaaagacaaggaaatactctttagagcctggagctaagggtgcagtgaacaggcagaaacgtaactgatcccaggaaagataggttggagtaagcaaatggtaatttagatattttgcaaataaattaaatacttttttaaaaagattcttccctcttggaagtatttagaaaggaatgtttagtggtataaaagagatggctaattattcttgtgagtgttgagggtgttatgtctccccaaaattctgatgttgaaatcctaacccccagtgtgatggtatttggagacagggccttgggagataatttgtgttagatgagatcataaggatggggctcccataaagggatgaatgcccttgtaagaagagacgctgtaggatgtgctctccctctttttctttctaacatgaggacacagcaagaaggtggctgtctacaagacaggaaaagagccctcaccaggaactgattctgccagtgccttgatcttcaacatcccagcctctggaactgtgagaaaatttttgttgtttcagctacccaatatacaatattttgtccatggcagctcgagcagactaagacagtagcactattttgttaaccatattttgaaattgataatagtgattttgtactgacaatgtggggaggaaagttgctaaacagctataatatttcaacaatgaaacaacagcttttctgaaaatcataggataggagatcatattgcttgatagcttggaaaaccatttacaggaagaataaacttactaaaagaggacaccaatttttgtttaactataaagtagatgcttgagacatgtggctaaataaatggaccaaaatatataaagaaacaatgacccatatttcttagaacatagctgtaattttccaatagacagtaaaagggaagtgatgacacttcactcagtattgggttgaatcatattaaaagtaacattttggtaggcaaagctgatctcataaaagcagtttcatatggtttaagataatactaaatagtgacgttgcagtaattaattcttaacatatgagttttatgtaatttatcacgttatagtgttagaaaaataagttcttaactgaacacaaattagtacttaaagtagcttcttagaatttgtttgcttaagactgtgataaaccagatcactagtaataaaactgataattatgaaattaacaatttgatctttggctatattttagggaatactttctcataaaagataattaagtattagttgaaataaagtatttaatttcaaggttattgctttgtaattgatttccttttaagaggaaagtaaactcaatttatattaaaagtagacaattgtatttttatgccccttgaaaaaaaaattgttgttttaaataaccacaggatcattaagttacatcctttgtggaagaagggtcccaggccaggattttaaaactctatgtactggctgtcttttaatacaagatattttgggaatgtattttcatttttcccacaaaatattatttatttctctaactgaaaatttataaaagctacactttccttggtatattgggagactaaggccctgagccaatcaaatctaattctgtgcgtaagagaatattttaaatacacataccctggcatgaacacacacatgcacacatacacacacacagacacactcagtagcaacaacaaatagcatgccctgatagccctttttctgaacaggaaaaaaaaaagaaaacctttcctattaacaaataacactaatttaactgcagtgttttctgtaagaatttctttttttttaattattttaaatattttatttttaaataggtaatatgtgcatgtggggaaaaaaaagttaaaggcacaagagaataaatggtaaaagttgaatctctcaccctcaagtctcccagttcctttctccagagttaactcctgtgaactttttttgaaaatcatcccagacatatttgatgacagctgaacagctattacagcacagcccagcagaaagaaaatgcaatccacgaaaatgcaatccacgtaagcaagtgaaaattttctagtagctatattttaaaagtaaaaagaaacaagtaaaattaaatgtaatattttattttatttaaactaatagaggcaagatgttatcttgaaatgtaagcaagaccaaaatattaatgagatattttacattctttttctctactaagattttgaaatcctacatgtagtttatactcagagtacatctcaattcagaccagccacatttcaatgtaaaaagtggtcactgtagtagacagcatggttctataaagttctataaagtataagaatctttaaaaagaaaaaaagtacaaagaatctctttaaaaatcctttcatacaaaatacattgttcttcatgttcttactgttccaaacattgttagagtcatatacctataagttcacatattataaaaagatagaaaatacagagaaaaagttttaatcacctatagtcctgttttagtacaaagctagttctgaacctcaaggaataagtatataatataaatacatttcagtcaaaaacgcataggtctttagtaagttgtgtacactaaacatgcacagcatttgtatgttaattagacctcaataaagtggttggttttttttctttaaaaaaatgaaataattaaaaccaccatttcccaagcaaaagcaaacaaccccaaaactcctaagtctaagaatgctgcccaagatatcattcagttaaaattattattgtgaagtaagggacttcactaaccaataatacatgtgtatatttttgtttgaaatgtgaaatcaatctctctctctctctctctctctctctctctctctctctctctctctttctctctttctctctctcttctcttgcaaagagagggccaatggcgggtatcgtcaacagctgttttggggtttggatttattgttttattctgcttggggtgggggccctgtagtacatttgactgaacaaacagcacgccttgctttgaaacaagggtgagcaggcttattctttgcctggagccagtttgtgccttcatacagctgtgtttggatatgtagatatggtacagaaatttggaaaattaccacgtgaaattattgtttatcttttcttctcaggggaacaaagttttgaataagcttttcattgacgaataaaaatctcagtgtctagttaactacaaagtatgcaatataaaatcatgtgattctgtgccatggaaagaacaccaggcctggattcaggaatgttccgtgtcagtcctcactctcacctggggcaaacttctagtgggacctctaggagcccactcagccggctgggccccatctccctgttccctggattaggaggcgggaccagggatttgtataacaatcctacaattcttcttgccatagatccgtgcaatgttttcaaaactttcctttcaaaataatgattctaaatcctagttacaagaaaatgtgttattcacaaaagtactattggataaaatttttctaacatctccttatggtttacagcaggtattggcaaactgcagcctccagagctaactgtttctgtatggccgttgagctaataatagtttttatatttttaaatggttggaaaaaatcggaagaagaagatgtcatgacacatgaaaattatatgaaattctaatgttagtgtcaataaagttttactgaaagccagctacacttattcatcgatgtattaacagtactgagtggttgcaacagagactaaaatatttaccgtgtgaccctgtacagaaaaagtttgttgcctcttgatttacagtgtttgaaaacaaatggtaatctgcagaaagaataggtaacttatagtaaggcacttagaatatgacaggtactgtactaagtgatgtgggtgatttttaaaaatatgaccatcttatgaagtaggtaggagtatcagccccaatttcgtgcatgaggaaattcaggcttgcccatgtcaggtaccctcaggcttgccacattgcaaaaaagtggcagaacctgaatttcactccaggtcaagctgcagagcccttgtcttctacctctgctccagaccatggaccttcctccacctttcactcaaaagacagagctgttttggcaatgcagaaaggaccaatctgcttcggaactccctgccaacaaaagtattggtgtctttaggactattaaaaagaacttaaaatgatatatttcacataaatccatccatctacagaatgtgtaacaacgcaaaagaagaaagttaaagttgtatcttcaaaatgcattgcaatatttcagaagctgagtgtcctactcagtgttaccaaagtgccaactaatgggctgctaccattcctgatcaaattgtcactgatacaaagtaaaataataaaaagaataaagacagtgtacttagtttttcatggaactaactattcagcttaaagatagtcctgtattgtgagattatatcctttcaaatttttggtgtaaaatatagtctccattatgaataatcatgccatacctcaggcttttttctttagtgtacttgcttgacaaaagtaaagcataaacaacactattttgggcctttatttgttttattttatttggaaatgtcttggtctgtggaatcctaaagtctgggaacctctggtttgaatgtcttttgacccagtaattcaatttctaggaaattatcctctggaaataatatgtggcataaaaaacaatctataagcaaaaacatacactgcaccattatttgcaaacagcaaaatttcaaaataagattgtgcaatcctcaaattatgatatagtcatgtaataaaataacatgtggccattacaagtcttttgtgtaatgtatctagtgccatggaaaatgctcacaatataatgctaaggggttaaaaaaagcaacacaattctatgataaaatatgattgcaactatgaaaattaaatgtataatcataatatcttattaaatgtctaaatgtaggcacagttacggttttttttttcagatcaagaatgtttttttcaacttcttttccaatcagtctgggctttttttataagcagccataattgcaggtgaaatctgttttgtttttgttttttttttttggtgcttttgccttctgttttttctcccattattctcatctttttgtcttttacttctgtgtcctgggagagctctaaatgttgatgctattgtctgtggtgtccattccgcagccaaggtgaggaatgaagcctttgattctatttgacatttggtttctttttgatccttcttcttccaatcatcattgtcatctcttcacagtttctgcagctgttccagagagatcatatatatttgcatgcttattgtcaaattattttcttcttgttaccttggtaaataatgtttagaaggcttccactgaatggcattcctcagaaggacatttctttcctcttgacctagagcaatttttagtaggctgtgtttgatcttgtttattcttaattcaagagacatctcagcagatccagtatttgccgacaggggaggtggcctcctgttcctctcctttctccctgcctgcatggggatggtccaacccctctcagacccatagctggagagttggtggacttcaagatccctcccagtgttccgcagtgtgcatccactggactgaggcagggttttccccaataccttcggggtttctgccactgtgaacaaatagggacaacaagctccccaggctgtaggattgtgaggcctcttagcatcccttctgaacctccaccacccatccccactgttatggtcaaattatatccgcagaaattcttactgaagtcctaacttccaggacctcagaatgtgaccttgtttgggaatagagtgttacagttgtaattttgttaagatgaggtcatcatggagtagggtgggcccctgatcaggtataactggtatccttatgaaaaggggaaatttgggcacagaaacccacacgaggagaatgtcatgcgaagacacaggcagggatgggggtgatgcctttccacaccaaggaagtccaaggacggcctacaaccactaaaacccaggggagaagcatggcacggtttctcacaacctgaagaagaaaccaacgctgccagcaccttgatcttggacttcgggcctcaagaactgtgagataataaacgtctgttctttaagctgcccagtttgtggtgctttgttacagcatctctcacaatctgatacaccttgccctgctaaaggataagaactcatctcttctggctccattcaagtcaactagtgctcaagtgacattagagttgtctcatggttcttcacacacactgtgttgtttctctatcgaggaagtttcccctgcctggaatctccccctcattcccaccctaatgccccatacatacaacctaccaacccacccttgccacctacccttacccactcacttttaccaacctatcttacccacccacccttgccaacctatctcttacctccaagccccttcaagcccacctccttttttttttttttttttttttttttttgagacgaagtctagctctgtcgccaggctggagtgcaatggcacgatctcagctcactgcaacctccgcctcctgtgttcaagtgattctcctgcctcagcctcccaagtagctgggattacagacacacaccgccatgcccagctaatttttgtatttttaatagagactttggccaagatggtctcgatctcctgacctcgtgatctgcccacctcagcctcccaaagtgctgggattacaggcgtgagccaccatgcccagccccaagcccttcttgacttgaagactgagttcagaagtccagactgatctcctccagaaagccttttctgggttagatggcctttctagggtgacaaactatcgtggtttgtctggaactgagggggtttctgggatgcaggattttccattctaaataaaaccaagaaagtcttaggcaaatggggacaaattagctgccccatctttctcaatcttcctgtaactccttgcacatatctttctaaaactgttcttcctaaatgtataataggatgatctgatttgtattaggataatctggtttgatcagactcacactagaccaggagctccttcagaacaatatattttcctacctgtatctcaacccttcctacatagtaggtgcttacttaatatctttactttttcttttttgagatggagtttcgctcttgttgcccaggctggggtgcaacggttcaatctcggctcattgcaacttctgccccctgggttcaagcgattctcctgcctcagcctcccaagtagctgggattacaggtgctcaccaccatgcccagccgattttttgtatttttagtagagatggaatttcaccatgttggccaggctggtctcgaactcctgacctcaggtgatccaaatgaatgaatgataagagcactgccaaatctcttcagggttacctttgcataaatgcctccatctactccacattcattcctggacagctacattctgggtactttgctccaattaatagctttcacgtcctctcaacttaggaaccagaggcctcaaagtgacattactctagaactgttgtatgtaatacccactgtatttcacaaacacaccaaaagtaaaccataactgctcagcatgctaacaaagtagttttccaagaatcaaaatttgacattcatcaagtctcttggaaaaataaatttcacctgaaagtggtttggttgttgcttttttaaaaatacagccttcatatcagaagctgctataagtcccccttcttaattgatagcatataaatagaaaagtgatccatttaaagaatactaaaaaaattctttcgaatccttcctaaaaaaatgattcaagagcatcttggagtaactctgtattaagtgaatagtgtcaatctacttctcacagctttttgaaaacaatgagatatctgctcagaaaaatattattctgataaatttttaaaaatatattctggattatataaattatatatgtttaatgtttttgtttgtttgagacagagtctcactctgttgcccaggctggaatgcttggcacaatcttagctcactgcaacctccgcctcccaggttcaagcaatcctcctgcctcagcctcccaagtagctcggattacaggtgcccaccaccacacccaactaatttttgtatttctagtagaaacggagcttcactatgttggacaggctggtctcaaactcctgacctcaagtgatccactggccttggcctaccaaagtgctgggattacaggcatgagccaccatgcttggcctgtttaatttttaaaataagaaaatattaatgattagaaagaaaggaaagaaaaactaacccacaattataccactcttaacacagttaaatggacatctttacaatatataactataattatccaaaaggatattaatatctatagtatttactgtataaaaaaacagttttcattattattaacaattctgtaaggaatatcatgttaaccaaatatttgtgtatatccttatccgttcccttagaataaatccttaaaagtgggattttcaggtcaagttatattttgaaattcttttgttttaaatgtttcatatgtttttcctagtcatatatttttgatgtcaatgaaaatatttattagctatgatcattgtgtatggacttgtatggctatttttcattcttttctaatttttacaattcaatgagaaagataattttattgtagatcaagaatctttttgatgacaaaatgtttacttttacctaaaagagaattatgatgaagttattgcatcttaagttaggtataaaaattatctctatatttacactgcttaggagaaaagtaatttgaaaatgtagggtggagatgagtgagttaaatgtaccaacagtattttagctgtctcactgcagagacattccaaaatcttgcagcacaagaaatactttgaaagtcggccttaaacttaatcccataggagtggggcttggcaaacaagtcagcatctttcttgtaaccctaagaagttcacagattccagtaagcttccatgcattttgcaatccagattctactccatgaatctttcgagtttatgaaatttcctaatacatcctacaaacgctctcactgccgtctgtctctcaatcatagaagtaccatatcaatttatagtctccaaaagtcaataaagcctcccctcccccaagtaatggggagaaggatctggaatcactttatgaagtgtacttaataataatatgacaacaacatgccacgttatcacagctcaaactaagctgagacagcctggtcagtacttggctatctttgaaacaaaatcacattcttcaggaagtggtgttggtaactcaataagcagcagctgttcctgggtctttgaaaaaaatgtttcatcatttgaccagtattcagtatccagcattatgtcccattataactgatggccaacatggaaaacctctgggcaaataaatacatgaaaataaaaattgctcttaatctgaggatcccatctcaatttaaatgtactctgttcacatcaatttctctgtaatgttaatttgcacttattacccagaaattccatacacataaaatgattgcttcattccttccaatctttataatgagcactccatccctgtgccatttaaaagctttctaaagacccttttaaaaggaaaggtgatatcactgaatgtaatgtttatttacaagacagtatgatcccaggcttccagatgctcggtataaataagaacccagaaacatgcgctgcatttaatagaaatttgagcccatcaattttacatgatcctaccaagaagagtgtagaatgctaatgatgctaatgagaacttgatgttgacagaagattcatttataaataaaaatgtccagaaagattattacatcaaaggatggtttgtcaatatccaccccacagtaggcctatcaagatgatcaaccgcagtttcaataacaataataaaaacaattatgattctctgtactaatgtagcacttttcatcagtggaccgaaaaagatctgtattaaatgatcttcagagcccttgaccacctgggcttgaagtatccccttggaggaagaatctaaatcaacatcgtgttcattattatgctgaaatggctttagcaatccttgctcagccagtggcatctcacactgtgtgcaccacacccacatgacaaacagaagagtcctctggaaaggagagagggtggcaaaatccagcttgtgcttccagtccgattctttcctatgccttacttcccccaaaatacctatggagctgagacgttcagggtttatacagtccatatataattattaaaatgtatacattatgctttaaagttagtaggggtctctactcatttttaaggaaaaacaaaaagctatgttttttaatcgagcttgagtagtagaaatacacatggaaggacaattcataaactactgtgtattctcttctattttgacaggttacggctgtcacaaactttggtatgatattagaaaaaatttaatttattgccgcttgtcataaagatgccaactctgccagcctctgatacaatttggatgtaaatatttagtgacagatgaggaaactcactcagagagcttcctaggtcagattttcaccattctcctttaacaaaggcagagatgatcttgggcaggctgataggacagcaagtaatcctctggcaggaatggaaatgaagacaagtatgaggcatggttgaagaaaatgaataaatagggaaaaggggactcaaagacataataactgcttcaggtgtgcagagggccatgatatgaaagaagtagatgcttgatcattaccatcctgaagaggcagagccaaggccagtatgaggacacccactggtggacgtttcacttcccagtgacgaagcaaaagtcatgactattcaacagagttgaatcatcaggaacaagaaaggagagaaggtataggtgtgctcactatgtactcactaattccacaaacatttgctaagcatgtattcagtgttgggcaccatgcaagacgctgtagatacaatggtgaggaaagacaaatatggcatgtcttatcttggatctggtggtctggtgaggattctgggcatcacacacatcaatgcagagccccagcttcagcgcatcctgttaaggggcagtgggtggactgtggggctgtgaggctgacctagtgttgagttcagagaagcttccctaagacagaaacacttgagatgagatcaaactaagaggagaaataaggcaagttaaaaagcacagggaacaaaaaggattccagagagagttagaaattccagtttgagaaaacggaagaaacaggaaggggtaaaagagccctttcaggtcacatttgggaattttgccttcttttaggaaaaaacataaagtcattaaagatggtgctgtggtttgaccgtgtaccccacaaagaatttattggaaacggtaatccccgatgcaaccatgttgggagatggggcctaatgggaggtgtttaggtcgtgagaactccaccctcatgaatgtatcaaagctgaatataccagggctcagggctgggagttcaatctcttgctatctctggtcactgtcttgcccatccacctccctccatgggatgacagcaccaaagctggggaggcatctttttgagaagtaaaggggtggtgacctggtcacattgctactttgaaaaagtcaaattaggtataggatggaaagtggatggaacaggccaaggtctatccaaggaagcagaaggggtctgccctaatgtcagatgctcctggatctagaataacttttgcttcatgcacttactaatttagtcagtgttcaacatgttaaatgatattttgaaagtagaaattagattttatggcatcaaaataacttgttagtgtctctgatattactgctgtggttgccaacaatatttcctttagacttcaggaatattattctgtgttcttagcaatgtcaagataatgtaattgaaatatgtcataagttattctattaattatcaaaataatcaaaaggaaagacagcatttattgataccatttattgtcttatccagttgtatgccagatttcagaaaacagcagaatgaagttaacctgaagaattagttgtttgaaaaacctgcaaaacttagcatgaacttaaattttctcacctctgtaagttacattatttcttgtgatgacacgtacttaatacacaaatgaagcgagcccatgatagcttttacacagatattacaaataaatgtgtttataaagattttatggaacagtatggagaagtaaaggagttgctataactcaaaggtattttctataagtgtccagaaagcaatgtcaataatttcctagggctggtggttaaatcaatgtgagtgaatgttattattccctcgtagaaatatgttatgctttctacaaagaacatgtatgcaaagctattcctaattatttatttatttattttttaacagtggtttattttgtggcttaacccagtcacttacaacaaactaaatgagctaaggatgagtttttgttatatatatgcatgtatgtttacttataggttaagcctttgttgtgggtggagggtggggatatgtgggaggaaactaaagtaaaggaacatgatgaatcccacttagaatcagaagaaagggatgtaaacttttagagagggctatggttgaacagaataatacaatgcagtattctcgttttgcacgcgctttgccatggtatgagtctagtttgacatctgacattttgacaaaatgaaaaacaaaaacaaaaatattagccaacaacaaaaacacatacatacactactgggattatcccgttaggggataaagctttcagttgtgcaatagggattgagtgcttaagaataacagacacacaagagcgtgggcacgtttcccaccttccatccacactgtgagaacagacacagaaacacacctggaggcccctgggctgcagggggaacccatgaaaggaggatactgtcttccttagagatctccaaattgtgtgctcaaattcttcaatccattccctcatacattcattcatcatttatttaacaaatatctatcaatcatctccagcatgccaggccctgtttcaatgattctgacacatgccacggggtgaatgaatgaagcagatggcactgcgcccattttacaggtatggaaagggacaataaaggaccaaggggtgacaaagtggaaactgaggccagggtcccaggtatcttgctcaatatttgtttgctttggtttagtttagaacagtgatattttaaccacgggtgattttggcttccgaagggccagggtttctgctacagtgcacagaacagccccaacaacaaagaatgatcaggagcaaaatgttgatagtgctgctatttagaaaccctggttcagggaaaccacttggaaacttcagtggatgatccagaatttatttttgcctatctgggtaataggaaaagttaaaaaaaaaaaatgaatttcttctaagctgttgacacagccatgtgattctttcataaatgagtttcaatctaagttctaatttttgaaaagaggtgtttacttggcaaacttcacttgcatttaaaaaaaaattctacagtgtgactatccattgccaccacaagcagcagcacttttacctgtcagagatggcgtctcagtgtgtagttacagaatgcacagaacagaggacgtctcactgctgtatcaggacactcaatccatgtgtggtttcccaggtgaaactgtagccctcctgctgtaaaagtcacccgcttaatgaggtgtatttaccctgtattagtaagaatctgtagttcaaaaatgctgtatttggggcaaaaatcaacatctctgaattcaagtaccctcgccccctctctcagcaagaagtttgtgtgaagagacagctggaaattctagcccttaagatgttaaacaaaaatagggataaatttactgtgtttacacggcatctttagtttccaaatgtgtttattctaatatccctgggagataaactggggcaagactcgacatcactacttactgaaccgggtgcagggcagggtgcttagatgtaaagacaaagtggcttacctctacggcttcctggccaggacaacactggctttgttatttacctccctatcaaagtcatagtcacgcccttagatcatgactgtaagcgtttcagaaggctgaatggttctaaatcctatagttatataattttgaaaatcagttatagctatgtttttgctcttcaaatctccttcatttaagtaaaggccccactgggaaatttttagattgcctgttaagaaaaaccttgtccaagaacaattgttctatcaaaattcatgatatcaaagaaaagtgtaaactagaatatcttaatttctttcaaggcatccaatctagttttctctgaacaacaaaatggaaaacctcagtcttcaaaaacctcatggacttttctcagcttttccaccaacacactggactccattctctctgctgtctaattgcatctgataaacatatttatgtaggcaaagaatgagcccatttgagtttctatctttgttttcccacagggagacgcacaaagatgttcggtcctttccttctgaaggctggacagttctgtgtgacgcacacacatatttctaagcgttttgcagcactgtgacattgcttaatgcaactcacaggggtgtgaagggctgaaaagacctttgaggtgagtacatgtgatgaaacaacacagagaaaaagtgtagcagggactaatttatttacggtaaaacagttcctatttctttaccttcagtcactctaatcatgttgaagtgaggttcaaagagaaagaaatggagcctggaccacaccatgagagcctggaaggaaaggtgtagccctgagctcatcctctgcagaggggaacaggcttctcaggccaaggtagatgacaaggagagctggcctccaccagaaactgccaaaagctgtaagaagctcctatctggctctaggcccttcataaccagacgttgatttagaccctaggaagaagacaatgtgataggattcatataatttatataattaataattatgtaataattattatttatcttatatatttatataagcatatattataattaactatataatttatatgattaattgtattaaatattcatataaaaatgggcttttaatatattgaatacatatcaatataccattttgatatcatatataaattataaattgcattgtataattatatattatacttaattatataatttatataattatattaactattaatataaaaattgtgcttttaatatatggattacatatcaatatagcatactgatataaaaattaatccctcaatttaattccattcatttatcacccacaatcatttattgagcacctgaaagcctgagttgagtacctccatgcacttatggagcactcagtcccttcctggcaccattctgtatactgaggacatggagatgaaaatgcacagccccccaccccctgtgctctcacagtggctcgcagcccgttgcacaaactgaagcataaataagtcattacaaggtgaggggagccacaacagaggtgtaggcagaacaagacacagcataaacaagggcctacaaactccaccaagaagtgatggatgacattctcaagcatgacaatgagtgcgatatttggcgagggtgggtactctgggtgagcagagataacttggaaaaaagtatctgagtcaacggcacaacaatttacaaaggggtcctccaggaagtatgctatgcaaagtatggaacaaatgaagaaagatgttgcctccaggggactttctagctcctatttttaaaaggatgtgtgtttttaactccttgagattagcagcatatgaaatgcacaccaattacccatacttttgattgattgcctttaatcctccactcctcttatatgtggttacaaatcctgcaaaattttgatgaaatctcctaaaatgataaagcagtgatgccaacagatacatagcctaatgatatgcagaagcagaagataacatagaattagtgaacacagaaatggaaaagtctcaatctcactattaattaaaagtatgcatttaaaaaaacagtaactttctgtttattgtattatcacatattttgcacagtgatcatgtctaatcctgggaagcatcgagtgaatctatatatttacatgtggcaattgtactatatgtctttagaccattgacctcaaaagaaaggaaaaaagaaaacctctatgcacaaagatgttcacgtcagtattatttatgaaattaataacaaaaatagagaagcaaatgaaacttccaaaattaataagagtgttaaatcactgtacatttttagatgagtcatggtattattcttaatattaacatttataattattaaagctcctgtcacatggaaacactttcaacataatgattatcaaaaagtgttagaaaatgacatgtatactatggtttcaactgtataagatatttatttacatagacgagaatcagaaggaaatatcaaaataacagttaatattacataaacacttttttgttatcttgaatactcagactttctgctaatactttttaagcagtcctaataagactagaatttggatcatttaataaaccccatagtaaggaaacaatatgcgtagcacttctacaaaagtcttagacacacacgcacaccttcatgttaaggtgaaaaatgtacaagcatatgaaattaagaaaaaattgcctcatatggatgggagtgaagattcattccaaattttgccttgagtagatttgcaagttgtcattacagtgccttctcttatttatcagtctgagcacaatggcagaactcggtcatctaaattatccatttaccttgtatatggaattaagagctctgtgttagggagctccaaatgtcaagaggcagagtcatgccggggattgattctgtagattagaacatctccaccaaggcatttggcctgtgagatgtctaagtagattaattgaagtagaaatgcattatttattatttaacacttagtgaaagcagtcagcaagctaggtttaataatgatttcttttagacactcaccgatgcataagaattaggtaaacatgacccaatcattacttgagaggtttatcaggtttcaaatcagaacttctttttttttaaagaggcaattagcattgtgatattcctcttgcctattagaaaagataagttttatgatatctatgggatctctaagaattaggcctatttagacaaggaatgagagaggacttttacactgttgacagaggtccattcagtcagggctatgtttctgatccctgtagataagtctagaagacaggaacacactaactggcctcaacattcctaatggtgactactaattatttcagaattggaggaagacttgccttcctgttacagctgcctggattgctggagtctgattcatacctagccatgtaagggaaagctcatcttctgcctggacagtgtcttggcactcctggatgcctggccccttggtgtgtgctccccataatgcataagttgcgtcatatttctggagtcacttcacccagcacagactgatctgaatcttcttctttttcagtgaagtcagcctttgaccagagaatccctaagccatggattctttctggctttggaagatgggacagaagatgtagatggttaaccatcccccaaggatggaggatctcactacccttcacacccagggatgacctcatcattagctctaatatgaagtctaatgcttccagttgcataagttggggcaaagtacttactctctctagggttcacatttttcatggtaaatgatgtctatgatagaggggttactgctgggactaaagacagaaaacaggccaacggcattctccagtggcttacagacaagcagtgcctgatgtattttgggtcctccatatcactttttaaaaaaattatggtaagaacacttaacatgagatctgcccacttaagaaatgtctaagtgtacaacacagtattgttatctataggtacaacgttgtaccgcagatctatagaacttgctcgtcttgcctaactgcaactttatgccctttgaatagcaacacatcaatttcctcccactctcaacccccggcaaccacctttctactctcgctcctgtgagtttgactattttagatgcctcatgctacatttgtctttctgtaactggcttatttcactaaacacagtgtcatccaggttcatccattctgctgcatatttcatggtttccttttttgttcaggctgaataatattctattgtatgaatataccatattttctttatccatttttttttttttttttgtgagatagagcctcactctgtcaacccaggctggagagtagtggtatgatctcggctcactgaaacctctgcctactgggttcaagcaattctcctgcctcagcctcctaagtagctgaaactacaagtgcacaccaccacatccagctaatctttgtatttttagtagagatgaggtttcaccatgttggccaggctagtctcaaactcctgacctcaggtgatccacccatctcgacctcccaaagttctggaattacaggcatgagccaccacgcccggcttccttccactctttcagcaatggacatttaggttatctctataccttggctattgtgagtagtgatgcaatgaacacgggagagcaaatatctctctgaggtcttgattttgatgattttggataaatacccagaagtgggattgcttccactggtagttctatttttaatttttttcgttgtcctccacagatttctctaacacatgcttctaacttcaaatttctttactcatagcacggattccagtaccgatccactctcaatgctgcccatttctgtatttttctgacaatttccaagtattttatgaataagtatctcttttcttggctaatggatagaactgaaattgctttataactaccagtggtgactgtgatgggaaggatgacagctgatgctaaaaaattaacactgaacttcagagtggtagcaaaaaaatgagggttatttcagaaaccacaatttataaacaacagacttcctaacaggctagaacaataagaaagtaaaattgtggatccccatcctttcagtgttggtttgtttttgttttattataattatataataaatattacactttcattttatatacagaaatgtgaatatttaaattttattataatagaatctttaataaaatcaacaaatatagtacactggaacaaatacacctatctcagaaaacacattgagggcagaaagaatattcacttataagtgcaatcagtgccttcaattatagttgagttccaaagatataaaatgtaaaatgtaactatatcatatatgatggtttgcttcctgtgaaatccactcattaataccttaaaggccttcccgtgatcctgtttaataatatattcttaaaagggtgttattctctgcaacacacatttttaattctggatatttaaaaaaacaaactcaacatttttcttggcattttttgcaaatgaattggagttcattcagacattcaattcagtaaaaacaaaaaacacatacatttctgcagagccacagttgaagagcatgggcttaggagagcagacccccgggtctggtcccagttctcctgcccctccccagcttactgtgtcaccttggctgtcccaagatgtgagttcctccttggagatgcagttcacagccagagtgatcgctaagcttcctccctgcattaaaattctattattctaagtctttctcacttctctggaatttcctgtgatatggatgcttgcaattattacacctctgacaattgatgccaataaaaaagcatctacaacatcggacaatgaatttcttatgtttttattccatacaaaatcatgtagttaggttcagaaataaaatattcatcacacattttgtggtaggctggtcttgctccacgggatgaaaacatatgtcgcaagagggaacaggtttgcctaaggacccatatgaacgaattcaaaaagaacctaaactcccaaccatgcctatctctcatacatgagctttctctcattaccaaccaacgtaaatatcaaaagttgatcaatgtagaagacttttattacacattgttcccacaaactactgtgacccacatgcttaggaccccaaaagcggtgttctcacttgcatccactgggtacacactggggaagtctctgggaccaggtggcaaataagacttttggaagtcttttccctgcaagaaagtgatggcaggatagtgcaatgactggaggcagacaaaacaaccacaaaaggccagagaggacttgtagctttacaggctgatcatttttattatgtgttattatatttaagaaagctctaaatatttttccaaaagactgaatgtgcttaaaaggagatacttttgttatccaattgctggttctctgctcaaaggacaaacaaatgaaaacatcagaaattctccagtagtgagaaacaatgcataagcagtcaaacctccaggaaaacttctgaaagctgaagtaggtgtatgaaaaatcagcttcattaaagcaatctatgagagctgcttgtctagtaatagctactgtattttgtggcacggacttgattcttagggactcctggaagttacactcaaaggtgcatttcataccagtcactcctccatatccaatatcttgttttacagttttacagtcttgcggccgggtggcggcaggggacaaatgagaaggagagcaagagggagcacatcaatgagaaacaatgatgatgagataattagagtgagcaataaagaattcatcacagggacagaggaccagaccaatgatcagcagccgtatctattgccttgtccttgttgttctcttttagtaagacctgagcatagaatagagtgatgcagtagaccaggatcttacatgtccattcctcttccttaggagagtcctcagatgatcctcacacagtgtgacttatccttcaggacaaggttagctgtttggctggggcttcagtccctggtcatttgtcatgagattccgggtcttcacaaagaggcatagagaacctgctgagtgttttcccttaggcctcagtctacagatgaaaggcttcctcaattaaaagccaattcttcaccatttgggcacccaaagtagacctaagctatgcctaactccacccattcactgtgtgattccattcctggatacaaagtacctggtatcaggatcagttcttacagtgggcctgatggtatgaaaggctggattatgtcattgtagaaggaattgagagggtagaagttactgattgggaaagagagagtcttcaaaacttaataagccatgttttcagtaacaaaaagaggaaaaaggattgggctggatgtttgttttttcaaagcttaacacagactattttttaaacatttactaagcatctacaatataatgtggaaatggagataacgaaattataagtattcttttttaaaaatatattttttattttatttaaatatttttaaagacaggatctcgctttgtcacccaggctggagtgcagtggtataatcatagctcactataacctcaaacttctgggctcaagagatcctcctgccttggcctcccaagtagctgggactgcagtgctcactaccatgccctgttaatttttttttattttttgtagaaataagatctcactatgtttcccaggctggtattgaactcctggcctcaagctctcctcccagcgcagtctcccaaagcactggaatacaggtgtaaaccaccacacctagcctataagcattcttaaataacttgaaagacaggagctaactaaaaagcagacagaaacggggaaatattcagctgaatgctggattattttgaatatgcaaaatttagcatggtctagcatggtcaactcccagcaatcattacggaaccgggaaattgttttccatttacttaagagatacctccattgattaaacacatattacatgtgaagactcttctgggcatgctacttgtataactttatttaatcaccaaatcctctgaggtaaatcctattatcaaaggttgccagttttagcaaataaaaatacaaaattcccagttaaattcgaatttcagatgaacagtaaatatttgtaatataactaggtcccatgaaatgtttgagacaccgctatgcaaaacattatttgccatttatctgaaatacacatttaactgggcatcctatgttttacctggcaaaaatattattattattccagttaaatgatacttcatcttcaggctaccatgctggtcaaactcttgtcaggcattacttggtgttagacaaagggtacgataactggatgaagccaagtttcacagaatcttcaagacatttttaaggtggcttgcgggcttaaaaaatgtggcacctatacaccatggaatactatgcagccatagaaaaggatgagttcatgtcctttgcaggatatggataaagctggaaaccatcatcttcagtaaactaacataggaaaaccaaataccacatattctcactcataagtgggagttgaacaatgaaaacacatggacacagggaggggaacatcacacaccgggacctgttgctggatgaggggctaggggagggataacattaggagaaatacctaatgtagatgatgggttgatgagtgcagcaaaccaccatggcatgtgtatacctatgtaataaacctgcacattctgcacatgtatcccagaacttaaagtattaaatatatattaattatatatataaattatatatgtataatatatatattatatttatatattatataatatatatatatttatatctctataaatatatagagatatatatatctctatattaatatatattatatattatataatatataaaaatatatatttatatatattaatttttatatatatatatatataaaatcctttccattgtctgtcttcccaactcccaaaggtaggccgaactgggggcttggagagagcttatatcacttgcccaagacctgtgctaagctgcctcatgtacccttaaaatgaaatatgacatattattctgagtttaatacatctaaagtcaggctaccctagcaaaacttcttgcttaaaaattaacctgtgagcacaaaaacatggcagagctgcgacctggtttaaaagagtgatgcctgaggaaagctagcagcagctaacattaaacccaaggcccccagcccaactctctcaggcctctcaagaaagataatttttatttaactgatatttgtattgcatttattgtgctgggtgtggctctgtatcttttattcttctgatcttcataaaaccctacgacgtagatcctattattattccaatgctacagaggaggaaactgaggaatagaggggttacataatgtcccaaggtcacatagctagtaaatgacaaagccaggattcaaacctgggcaggcgggctccagaattcatgctctgaaccactaagcaatgtcaacttgaattccatatattataaaattttggaaacagatcaagaattctctgcatgtatgaaaaagcacatgatctattcatcatttccaaaactattttacgaacatcatctcctttggatcttagagcaactggataaaggacaggtaatataggtatcattattgctattttgcagaccagattaagagagataagattgtgagcagtgatgcatgacaagttcaacattagtaaattagtaaacacagagtcttatctaaaccagattctctatccactttacctaggctcaatacggtaagcaaaaatggaactcagaaaatgctaagaatgattgtcttgctctgatttaaaaatctggattttgcaatgcaggaatatctttaagtttgggattacaagaaatgtgaggcagggctgggcttgctgaagcaggatacaaggaaatgaaaaccatcactctgaattgtttgctcagttgtcttggggtagcttggtaactataccagaatgggaggcttaggtgtcattataaaggaaatccctactttggaaagtgacaccaagtgcggtcatcaacagagagctaacagcttttttctgccaactggaggacgtctactaccaaaactctgatccatgcttaaagtgcttatcagtgtgcccggcgcagtggctcacacctgtaatcccagcactttgggagactgaggcgggcggatcacttgaggtcagtggttcaagaccagcccggccaacatggagaaaccccgtctctactaaaaatacaaacaaattagccaggcgtggtggcaggtggctgtaatcccagctactcagaggctgaggcaggagaatcgctggaacccgggaggcggaggttgcagtgagccaagatcatgccagtgtactccagcctgggtgatgagagcaaaactctgccttaaaaaaaaaaaaaaagtgcttatcagtgaaaaaggtgattatagttgaatgaacacaaaagttgaaatctgggtacctcacttcccaaaagtcagtttcctaggtacaaagttgtatttctgggaaatcactgtggcctgatattaagtaacaagatgatgatggatttagatctaaagcaaaaatgagagagctattaaatagaaaaagacattggtgtttataatgtatattttagagaaaaagcagtaatgtatgacttttccaatggaaagcagaaatcagctgtgaaaatagctaccattgttgaactcgaagtgagtcactgtctgcagaactcttccgaaagagaagaatgtgggccgccagcacccagtcgcggctgtgatcttggagatgtcagagcaggcaacatgcctgctaatgagacctcagaagtgtctgatcatctcttctaattgctctaaataattggagagctgcttggcctggcctctccttcctgaagacggtcagttcaaatatgcaaatataaaattatttgaatactgctctaattggagtacgagctacccattatttgctggagaacaaaacaatatgactaaaaacattgactatcaaatccttcattttaagcttcactgagctccccaaattaccacgggcagtcctgacaaggaccactttacaagggagttgatgacccctaattaagacacaaggcgcttctagttatgttaatatttgaaattgaaattggtttgacctacgcagttccatacaataccaccaagtgaaactcaaatccaggcaccttaagttgacaaaatgtccaatagcccattaaatgcattgcaaattcaagttccatccatcccccacatcccccaagttgactgcattacagaatgacaaatccaaaatatcatacctgatcacatggttttctgtagaaactttatccaacaaaggacattggacaggcattacaaattctttttcctaccaggagttgggatccaccatgcacacatgtttggccactctgagctggagtggtctctctcagtttctctccacttgtcttcccagcaatctcttcttttttaacagaagtctcatcttctctcctctccctattccagtcttcatctttcattgtgttccagggtaccttccccttcactgatagccctgctcacaacttgaaaatttgggttgttttttttttttttttaaactttctaaacctatttctgcatctacctcagcaatatccaatcccattctaccataattttctagatgaagttacaaaacactgccttctcttttaatttttgttaattccatctcttcttcctatatcccatatttcctcatcctcagaaacaaaagtaaaactctcaacttttcccaactgcactcaaatttactctctctacccttcccatcccggctgtatttcttgaaagagtagttgacacctcctgccttgacttcctcatcacccaagagttccttgttgttttataatctgttatccagccctacactagagataagtttttcgtggaaattaaatgttaaggaactcttgctttggagtcagactccaagagctggatcccctattctctcaagggctaatgcctagctacacaatttgcttttcttccttttgaaataggattctaataaatttcagtgtctcacagagttattgtaaaaagtaagtgacacaggtgcttgacaccacactggtccaattttaagtggtcagaagtgctgaattttgtgtgttttccattgttattatgctgtgaggccaaatcccatgacattcctcaattttcatcttctttgtcttctcagcaccatttatttcaagattgtttaaagtatttaaatattctccttacccatgacaattactcatctaattccgcccttatctctgatgatttttctcctgtcttcagtggatccgattcctcccccaccaaactctacactgtctttaggagtgtaatcagctgatcctcacctcctcctattttcccttgtgatctccccatgaccaaaactcctattatccctgtcttacttatgggtaactcccaaatgtggaaggacaggctcagcctctcccacaaactatctgctaaacaaatcctgatatgccatcatctcacatcagcaagttaaaactaacaaataaaaaccaaatatctttgccttccctcctccataaggccttttccactctcccttatttctgcaaaagtcgttgttaattcccaggccccaggctatgaaactgacagccatctctaactcttcttctcatttgctcccagactccgagaattatctttatctcttagagagatacagagaattgttatgctgaatccaagcagacggttggagtaagaagaaaggaaatcttggaagaaagtgttgttttagaagttgtaatggctgcaaaagaattaaggaaaacaaaagtttcctttaacacctaccatgtttcaaagaccatgttaggtctgtctttcctgatataataatgaaaaagtcatcatttcaaaaagaaagggaagtgtgcaaaaattaatttctgatgataaactgggaatgtctttgatgagggaaatcaaggagcaatgtctacaaggatgagatgaccaaggttcatccagtgggctggggcttctcaaagacaaggagagcagaaggagagaggaactcataaccagtaatattatcttgtaattagattattggcaaagtctagaaacataagtctttaaaaaatccccaaagccaagaaggaaggggtggattttagtgttttactgcactgagaaataggtcaatgtatgtcacagacaatggaaaggagctgaaactacctgagttcctatttggaatcatcttttctgttgacagtcctcttcgacctaagaacacttagtgctataataaagctgaggcctcagttaggtgagagttgacattgattgactaattactgtgtgtcatggacacctcatttaatcttcacagccactctctgaattagaaagttaagtttccagataaagaaaatgagaccccacaggctgggcgtggtggctcacacttgtaatcccagcactttgggaggttgaggcaggtagatcacgaggtcaagattcaagaccagactggccaacacagtgaaactccatctctactaaaaatacaaaaattagctgggtgtggcgggggtacctgtaatcccagctactggagaggctgaggcaagagaatcgcttgaacccaggaggtggaggttgcagtgagcagagatcacgccattgcaccccagcctaggcaacagagctagactccgtccccccaaaaaaaaaaattaaaaaaatagaaattgagactgcatagatgctcacagcactcagttacttaattgctgagccaagatttttacactgtggactcagaaagccaatgagttaataactacatgatgcgactcttcacatctgttatctctataaaactaacttggggtcaggagatcgagaccaccctggctaacacggtgaaacctccatctctactaaaaatacaaaaaattagccaggcgccgtggtgggcgcctatagtcccagctactcgggaggctgaggcaggagaatggcgtgaacgcgggaggcgcagcttgcagtgagccaagatcacgccactgcactccagcctgggcgacagagcgagactccgtctcaaaaaaaaaaacaaaaaaaaccaaaaactaacttgaggactgggacactttataggggcaatcactgaatcattggcaacctctgaggagatatggaggataggaaattttcaaaaagaagaacaaggtcacctcagttttcaaaaagaagacggccaattctgcaaaataataatttctaacatgactcaataatcacttgttatgtagatggtttgtgaggacttaaacaagacatggttaatactatggagcaacacacattcttaaaaacagactaagtcagacttattgcatttccattttttttctgctgtacacttacaaacgagggagggagtcagcagactgatgcataaacacagagtttcacattggtgacgaacttcagggctggctggctgatgtttaagttcacatttaacatcctcaccaagatgtcacttggccttgtcaaatctctagtgtatggaacccactgcctcactgccttgcatattaacacatttcatttgtgaaaagttgagactattttggatagccgcgatgagtcagcaagtactttcctatattaagttgaaatctagtgccatgaaggtttccacctcttggttttgctttaaacacttggaggaaattcagcatagatctgactttctttccccatggagagtggttcataatgaacacaaatattaggcccctttctctcacctcctcactctgtttctttaatcaaccttcattggagaggagttttctaattacttcagtttccaatttgctacacagcatgagaaccacctagggagatttttgatatttttaaagatcttcttcaactgtgaaatcattccatcaatcagacaaaactacagaaagtaatacttgtctttaagtctattttgttgatattcatatagccacttctgttttcctgtgattactatttgcatgttttagcttgtctatcctttttgtttaacctagccttgcccgtatatttaaagtgaatctcttgaaaacaacatatagttggagtttcgctttttttaaaaaaaggccttataatttttgtattttaagtaaatgccttcatatttaataaaatgattgtataaaatgattgtatggctgagtctcctaacattctatttgtcttcttttgtctcagaagttcattgtttctttttttctctctttcacatctccttttggattcaatttgtattttataatatgctcttatcttcccttttggatatttagaacaccacatattatttttcagtagttgctctaaggattatgatatttgtctttagcacaatataatgtatcttgaattaataacacatcatataaaaaactaacaaaagtataatttcatttaccttctcccatccattgtgttactattgccatatatttttctacatatgttataaaccacacatttttatcatttttattattcttgcctacagagaaattaataattgagaaaagagcaacttttatattttcccacatatttataaggtatgttactcttcatttcttcctgaatatccagatttccatctggtaacatttgtcttccacttgcataatttcctttaacattctttaaagtataggtctactattgacacgttctctcagttttggttacctgaaaaatgttctcatcttgcttttattttcacaggctatatctgctatatgtagaattctatgttaatcttgttgttgcttcttcagcattgtagagatattattccattgtctcctggtttatactgtttttgcaagaagcctaaaataattcttatcattcttcctgtgtatctaatttggtttttttcctctggatgctttaaattttctctttagtttttatcaattttattataatgctcctaaaaattactttgttttgtatttttttgtctgggattatttgagcttcttgaatctgcagattgacatttttagtcaaatttggaaatgacttgatcttttatccttcctttttttcttatcttctccaacctctctccttattttttaggatttcaattataaatatattagatcacctgatattgtgccacaggtcactgaagctctcatcatattttttcaatctcctcctctccttctccttctcctccatctcagtgtttcagtttgggtggtttccatggacctctatgttaattcacccttttttttcgtactgcattttccaatccccattaaggccatcctgggaaatttctatttctgctattttatttttaagttatagaaattttatcttgttctttttgatagttttcatttatcagctggtagttcccacctgttcattcattatgttgatattttcctttaaaattggaacttcaactttggttcattagcaccccaacatctcttaatactatgtgtcctcaggattctccattctcacagtccctagcaactatattctgcctggcctcatggagtcttatctgcccatacagagcttagtatgtcactcaaaactccagggaatccctatgctgatatatagaactccttctctgtgaggttcccctctatctagtgcctcaaccaacaaactcagttactaatgctgatccagcctctggtctgtttcccccgcccagtgttggttctgcttccttgtgtcacaggttggaaagcatacccaggcaaaagactgagttgaatgtggggttcactttatgtgtctcccttcttttgaggagcacagccttgcattaactgtagagtttaatatctgaaaatagttgcctcaggtattttccttactttcatgaattggcaactatgtctaaaactcattaattcatcacggctgcaactggacatctcatttagcattttattaatagtagtgtagctaaaaggttatctataaatattctacttcattcagctttttattgtagtaggtttctttaatttggtattccaaagacaatatgatccttaagctttcaaataccattgtatagaacaaatgtttatcaaatggtcataaaataaattaatgaacaaaagtaaatgtaattttgttttgttatttctaaaagcttttcacttttcattatttcccaactgaatttgcatttttaggtttgctttctccttagcttaatctgtttctgttctgtttctcctggtggaggctgggataaggatgtaaggtcaacactcatagagtttccagtctagagacataaaggggccaattaaaacaataagaatatagtctgtatcagtgggaccactgaatgagaccttatctctaaataataataatattttttaaagtatttgtaagagaatcttatcacttaatacagtgaacactaaacatacaatgaacacttaacaaatgtataaaagattggtcttttgctcctattttagttttaaaactcagttattggaaaaggcataagttaactaaggaaaatcaaagctttgttttacttgtattttgcatgctacatggaaattgtcacaataagaaaatatttatgagattaaattgacttaagagcaaagatacattgttttttaagtaccctatcaagttattttcagaatatagactgggaatatgccctggaaaaacatccaactatttaaacctacagtaatttacattgatttctgttgccagctattgctgctcaatgctcaacattacatcctgtgttgaggtgagtaaggtaatgaagcattaagtcaggcctggactgaagaacaggccccattttggctgcatgcccatgaatgaacatatgttagggcacagccaaactggcagtgtctggcatttcttcctggcggtcgccacagctgacctttttttttttttttttttgtaatactgtgaatgtgtgcgtgttccaataactcagcttaagttacgccttggagatgcaagacagatctttggcttgtctctagctgagctttcccttcaaaatttctggcatgctttagaatgaagacttagacataatttgagacacatcttttattaggacccaaccatgagttggtcaaatataataaacttccttctcccacagatagtaaatggatcttcaactctactagcacatttaccagtctgatgagacatgttttaaattttccaggagaagggacctctatctatcaggcagctgtcctgggagctctgccctgactcataagtaccacgaaacttactaaactcacagcctctcagagaggtttccataaactgacctacttttttcagcagtcatttcacagaaatactaatgtttaggtggtgattttgtattgtcatctaggtggacatttataaatatattttcaattgtaggataagaccaggctcaagaataaagttgatcagcttccagcatgttcctaaatgtctagacattcacacttctttgtaaagaaatcctttatattaaaaaaagtaagacatagaagcccaataggcaggagaagagaatgattcttttgggaaccaaaggatccagaaactttaatgtcttcttttctcgtccacagatggttacaaacacaattgtaaagaaaattgatttccagtggcatctgtctcctacttccaggcccctttcctcatgcattggttctgtttcccaactacctcttccatcttcccttcaggcaacctctgtattgccatgctcccttatcttttatcaaaaccttttcttagacaaggtcattatatcagtcattcacaccttagtatgaactaaagtagatgtcttaccttgataattatattgtacaccaccttcctccactagaaggaatttctactatcggagtataaagagttatttaagataaaggaggaatttcttagcaccactgaacctgaaaacttactctcctaatacataagaccatctctggactaccctaaccatttactcttgtattcaatctcttggccaatacttaggataaaattaattctgggacaacagtcttgagcatgatgaatatggtatttgccacaggggttcagaggaggaagacagcccttctggttgaaaaaatcctggaattctttatggaggaagtaagattagtactgaaccttgaaatgtacatcctagaatctccctctgtttctgcagctgtaaaatgtttgtggtgagatttgactagaacaaggtgcctagaagaacctgaccaagacgctctactggttgactgctggagtttggaatttgtagagaagatagaattacaggtaaattttggcctcactgtgtcatttttagaggccaccttcaaaatatccagctaagtgcacgtttttctcctgttgttccatgtgcaccaatcaacatttcctttggggtaaatccccttaaggctacctctgggaactgggagaggctgtgtagccctctctcattgattcatccctagacctgatcccatagttgatgggcagacagtagcctgagagatgctaagagttgggaaaggtaaataaagtaacaaagagacagatgatgacaatgtaaaagccagtgcagacaacgtacgcacatctatttatcacatttttattgagtgtctctatgctgcatgctggtgtgatagtatctgttgtgggttgaattgtcatgggttcaacaaaattcatatgttgaaagtctaacccccagtacctcagaatgtgactaatttagaaatggggcgattatagatgtaattagtccagatgaggtcttgcgactggcccctaattcagtatgacttataaaacggggaaatttgaacacagaaacacacacactcagggagaatgccacatgaagatgaagacagagatggggtgatatgtctagaatccaagaaacacaaaagattgccagcagccttcagaagctaggaaagagcctggaacacattctccctcacagccttagaaggaaccaaccctctaatgctttaatatcagacttctgacctcaagacaatacatttccttttttaagccacccagtttgtggtgtggcagccccaggaaactaatccagcatcaaataaaatatagttcctctcttggggcactcatagcctgaagagagccaggagaactttgataggggctggaggagagcagggaggtaaccctaccgtgtggtgtgagtgtgcaggagttgggagggggtatccagagggccatttctggaaggtaagggggaagagcactggatgaagagtgaagagggccaagcttagttcaagctttgccactctctgggtgacctcgggacatcactacttcttggaactacagtctcctaaagcagtagataaaaggttcctaaactaatgcattaaaggttaggataaatgaggtcatttctaagttcctccagctccactattcacctcgctctatgtctgtcccagggacattgctaaagctgaggaggttcaaatggaaggcaagagtttccaaaataatctctgaagcctttttaaaattcactgagggctagctctgggcatatcttgggtatgaacatttcattgtccgttggcttcattttattactctgctttcttgtctctggctgtgcacgggactgaaattgctcactctgtgaggctgggtctatggacgtaaaattctctttaaacagcatgcagcacagcatgccatggagctagatgtcttggaaaggcctctctgttgattattttcaagaatggcttcagactatcatctggttggtatttctttttttcttcttcttcttcttcttcttttttttttttttttgagacagagtctcactctgtcgcccaggctggagtgcagtggcacgatctcggctcactgcaacctccaactccctggttcaagcgattctcctgcctcagcctcccaagtagctgggattacaggcatgcgccaccactcccagctaacttttgtatttttagtagagatggggtttcaccatgttggccaggatggtctcaatctcctgatctcgtgatccgcccacctcagcctcctaaagtgctgggattacagatgtaagccaccgtgccgggccaacctggttggtatttctaagacttttgtattgctcaagatcacccttgaaaattacaactctccttctagtccaccatccagcactccttccccagaacattatcaccctctggcccattatatactgtatcatatgtgatatttactttctgtctcccttgctgataatgtcagctccagaaaggtaggactttttagctgctttgatcactggtgtatcctcagtgagaaatgactgctacggtttcaatgtcccctccaaaactcctgttgaaacttaattcccaatgtggtagtattgagaaatggggcctttaagaggtgattgggtcatgaaggctctgcactcatgagtggattaatccacccatggattaatggattgatgggttaatggattaatagcttattgtgggagtctgactggaggccttctaagaagaggaagagggaccaaagcaagtaggtgagcaccctcagctccctggccacatgaggctctgtgccacatcaggactctacatagagtccccaccagcaagaaggccctcaccagatgtggccccttgaccttggacttctcaacctctataactgcaaaaaataaattccttttctttataaactgtttcaggtattctgttataagcaacagaaaatggactaagacaatgaaaaagaggatctcttaaacatacatctgcaactggaagaagtcccagccccctggcacccagcctaggacttggcatttgataaatgctcagtgactgttgagtgaacacatgattgcccatcgctccacacagatttagtcttcactgagaattccatatgtacagacatggattaaataattgagaaagtgaaaggacttaatcaagttcatgttaattaaaggtgagaacttacattctctgtcttggtaaccaacctgcacagtcttaaaaagcagaacactagaaacaccttggtagaaattaagcacagaaagaactattaaagagcatttgcgctgagggatcttggccctagtagaatgtggggccagaattctaagatggtccccaagataccctctcttggtgtatgtaagccctataaaatcccttcctccaagtatcagcagaaccttcgaatacgataaggtatcagtcctggaattatattacattatatgcaaatggcagattatttgggatgaggctaattcatcaaacgaggtctttaagagtgtttactccacctggttgcagaggagaaagtcagagacatgtgctcttgttggcctgaaagaagcaactatcatgtggtgaaccacctacaggggccacacagcaaggaacggcaggcagcctctagaagccaagagccttcctggaccaacatctagcaagaaaataaggacctctgccatacaaccacagagaaatgaatcccactaacagtgaacttggaaaagcatcctaagcctcagatgagaaccacagcacctttagatgggaacagtatggtagtccgttcaacatcttaattgtggtctgtgaaaccaccagcagacagccctgccatagccagcctagacttcatacctacaggaactgtgagaccattgatatgggttgtttgcagtcactaagtttgtggtaatttggtatgaagcaatagaaaaccaatacgcatagtgagctagctgagttcacttctcagtggttaaaaagatgaacaaataaaggttaccaagggctgtcgggggtaaaaggagcttttgtttaatgtgtacagagtttctgctggcagcaatgaaaaagttttgggtatagatagtggtgatgggtacacagcactgtcaatatactttaatgccactgggttgtaaacttaccaatagttaaaatgataaatattattttatatatacatatatatatgtatatatatatatatatatatgtatatatatatatattttttttttttttttttgagaaggtgtcttggtctgtcacccgggctggagtgcagtgacgcgatcttggctcactgcaagctccgcctcccgggttcacgccattctcctgcctcagcctcctgagtagctgggactacaggcgcctgtatgctatatatatatattatcacatttttaaagagagaaagatgaataaataaaaagaatattggatcactctacttctttgattacggccaatgatattcttctcaggcccctaatctcagtcctattcaaaattaattctaattgactcaaaatatccttcaacttaaaaataaattttatttttttaatattttaaaaatattttaaaaataagttctctatcaaatgttgagtcttgctgactcatgcagtagagggattagagaaaccagtacaaatcaggaagagtgaaaaatagcttgaatcctatgaatcatcttgagctttgacagacaggaaaggaaaagacagagttatatgccctggcaatgtgagaatgggttgggtcggaagagtagcacccataaggcaagatggaaaaccttctggcattttacttaagccccatggctgctcagggctgacctaagcaggacaaagagaccaccaaggcaggtgaagggcaggacccagacaggaggtagagaacaccagctaaactgtgggagaggattggggagagcccagcaatgaccaggaagctttttgtctggggccatgaacctgggaccctacccagcagtgacagcccagatgacctgtcagggaggaaagtcctgggaatggtgacaacagatgccatggagggctgggatgctcaggactgagatataaggattgtctcaatggcacctttctagaaggggaggatttttaagagtttgacttcagaatttggttccctagtcatggattgttgggcatggtgaaacatgaccatctcagcacaggcctatagtctgatgaaaataagaactgagctctcctggaaggtagacttcttggctgtggattgtggtctggtcaatgcatcctcaacaactccagatggagcttcttgtttggtttcctaatctcccatccgcacaatacccaaacccataaataaccctctgcccctcaaaccattctgccttttgttttcttctcacatcttgtacatcaccctgcttctatggaggatcctgcaatttattaataataataaaaacagtggcaacaatacaaaaccaatattgcttatgggccatccacagtgcactgaagccatgctaagcactcaagagaccttgtctccttcagttctcacagtagctttaggagatggtggaggaaagagctcagctcagagagggtaataacctgtccagtgtcacacagccagtgagtgggttatgagttttaacttaggctcatctgactccaagacctgcactttcaatttaggacgactcaactctccattcattatgatcctatgagaaggaacttcataagaggtgggccatggtttcttttttttgagacagagtctcgctccgtcgcccaggctggagtgcagtggcgcaatctcggctcactgcaagctccgcctcccgggttcacgccattctcctgccccagcctctcgagtagctgggactacaggcgcctgccaccacgcccgactaattttttgtatttttagtagagacgggatttcaccgtgttagccaggatggtctcgatctcctgacctcatgatctgcccgcctcggcctcccaaagtgctggggtaacaggcgtgagtcacggcgcccggccggcaatggtttctttatgtggcctttcttgccaatagtctggaagcggcactctatgtcagaggtagaaaggaagcaggcatctgtccatcaaaaggagaaactgggggcagacacttgatgacctacaggaatttaaggaaaagcataacactcatgcgtatattctaatcaagcaaaagatgaaaggccttatggcaaaaaggatagaaaatttcaaaataatagaaaatttggttggtgtgaggtcttgtttagtgagcgtcatttataacgttcattaaacattaggaaacaaaaccaacacactacacagtcgtccacagaaaacagtctgggcagaacacggcattgcttctcaaaacatttgagagtatgcattttcgccaggtgctcccttaacattttaaatctcactgcggtatctcttacttaaaaaataaaataaaataacgaaagctgtctctcacttacacaacagtccaaatattctgagtactcacagtaccaaaatatatatatataatatataaacacatttgtaaccctagttctgcaaaggtcctttatctctcggatattttgcaatggtttccataacctgggatactgcttgtaaaattcatctcgacaagctaacagattttcccgaaggctggccaagaataattttaaagaaataaagtggcttaacccagttttcttgtgtattcaggaaaagacaggatatacatttatatccttaagaagcaagtaatccaactttctttccaacatgagcttaaacatgtttggaagaagaaaaataactaacttattaagtatgccattttattttgctttgattgttccagaattagttaaagatagggaagatagcccccaaaatgtaaattatcaaataatcataaaagtaaaaatattgtgctaattatttcaaaaatgacaaatcaaactgggaattgacatattaagaacgacattttctatgtctggaatttttggagaaaaagttactatagattagataatgtttgaataactaaagcctgattcttagcagaaaaatctcttttgctttgaagtattttaacttaaatgtttctaaaatctgccttacaaaaagtatgtcctatatatcaattattgttctgaggtccaatgaacaaacaaacccaagaatgctggagttttcacttaggttgggcccacctccaagtctcaagtctcagctcctctgaggtggagactgccaggcatttgatggctggctagagaggaagaaggaatagggcagaatgaacactttcactttggtctttaacagaggtttatctccattcatagaaaaatgctgcctgtgacaagcagtcccaagaaaattccatcaaaaagtggaattacactttttgtgtaaagtggatggcacacagtcatggtagaataaacttcatagctgtgtggaaaggtgctgtagacagaggggaatccaatcaattaactttctgtggaatggaaccactttctacagggatcaggagtagaaaacagggagggagaatgaaagcccaagaagaaaggctgtttccctgtagccaaaggtgggaaagaaaccagattgtcccctacaacattaggcagtgactcagtgcaaatcctctgaaggcttgaattcattttgactattatgtggatactcaaatggctaaaatgaaaacgtctccgtccttagcaatattttcaattcaagatctgattaaaaagcaatgatacagtcagcaagggctgtgaagacctctgaacaaggtaatgccatcagaaataatcggctttttacagaaatggagcgaggttcccctacacacagactaagtgtgtgtatgagtcacaagccaatcagaaagaaaaagagcagaaacagaagaagttgtttaagaacataatacatactttcaaaaaattaaagttggcatggaaaacagtagcaatttgctggacatccttacacttagtttgcaggtcactggtgttttacttttggattacaaacaggcattacaggggccacgatcatttttgtgtgaatggcctctagacatttaaagaagaacttgttcagaaagcagggagataaaactacaggagtgagtagaccacaaccagcagcagaattagggtgaagagagccaggcactctcctcggacgcaaaatttaaagaggcaacaaaacaatgcaggaatcaaaatcaatcatgttttaatgtactattttttaaaaaccaagatcaatgctaaaagtcatgatgaacaaaatatcaaaattttaaataaagatggaatcagcgttcctgagccttaggcatgaacaagctcagctcagcactgttataaatcctgtcattatttagactttgacagtttgttcatcatagatttttatgcattaattttgattttaaaaatatatagcattaaaatattatttatcctgattacaggcgtttttgtgtgtgtgtccccttaaatgatatgcctgacctcaccccagagagatttagagaaagctccatggataactgctcagggcagacagaatgcccgagacacggtaattcaccgtctgtaaaagccaccaagacacctgcgatggtttctaaagtcttcccacttcagtgttcctaaattagctctaaatacttactttttaattcaggaaagaaaaacaaaaatcactggcaaaagtcatagagttaaaataatattgagaaggatttctaggttaataccctgacttccatttcagagcaaaattttaagttttcaaacagatcttttccatctctgagattcctaaactctagcatgtctgtgaactccttattagatattcaactttctaaattcacagagactaagtttctctatatattcggcttgtaaatcaatgaagagtgattattttaaaacagcataaactagcattgtttttacttttgtttctacgcgccaaaaaagaggaaatatcccttaaaatgaaaacaagttttctagccacaggaagaagacaaaattcaagtaactaaattatacctataaatattttggctgatcgttctagggcttgaagttttaattaattggaaatattttacacaacgttcagcaataacatctataaacatataaaatgtgcaaaacttctaaaatggcctggtcgttaaagtgttaaagtatgtgctaatggaagcatagcgagggagctctgctgaagatttctctatatgtcctcactttgcagcataggaaagattgctctgccacctattggccttccttatgaaatagatttaatcttacctggtagcaagcatttacctgttcctggacttggagaaagcctcaacttagcaaactgcaagcaactccatctggtcctctctcaggcttttggtcaagactgggtccaccaaggaaaatagcaggactcccactgtcacctctgtggacccactctgagaggcagcggattactcccctcaactgcacttaagaaggccacatattcacagcacagtgggccagaggctgttcaacaaatgcttgctggccccacctggacacaaccaggaatttaggctgaattaacctctcattctccgtacatggcctgaacacattaaaaaaggatgtcctcccccgaggtgtttggtggaccaggatggcaaagaaatatactaatttagctcatcactgggtcccacccaggaaattctacgaatgtgcgtgagtttactttgaccaggtatcttgacctggaatttcttgaattaactagaatgagatgaacctagttgggatgggaacatctaggacaaaatgataattctttttcattttcttttttttttttttgagacaggatcttgctctgtcacacagtctggagtatagtggtgcaatcacagctcactgcagccccaaactactgggctcaagagatcctcttgccttggcctctcaaaatgctgggattacaggcatgagccactgtgcccagccaatgataactcttgattttcttttcttgttgattaaatagcaccaaccactaaactttaaccagctgggtcaagtaatcaataatatttgtgtttttagcagggaaatgactaacatgtagctctaggcagttgacacagtcttcttgggtatctctacctcctgcctaccctccctatccacaatgccaccatatttgacagcttcaatgacttctccatcgagcctctctggttctagtctcattcccccaccccaacatcaccgactcctcctctaagctgcttccagagcggttttccaagatgcaaatctggtgacatcattccttcgtttgaaattcttcagcagctcctcatcccccatcaaaggaacctcagatctttatcatggaatatgtgaccttctgagattttaccttcctttccagagtcctttcccaccaatccttcatcagcctaatcaatactagcagtggggtggaaggaagatgagaactggtatagcaggaatgctaagagaaagcatctttcacttgaatattaaaatattcaagggagaatgaagttttaaagagtctttttgagtccattaacaaagttaatagaacagaagaacattagatatatgaaaagtccatccatggtgttgtgaatccatcctatgtactagaaccacaggaggcagctgcctggcacgtctttcagaatttttcaggacatagtaaaattatcttcatccttttggtagcttctatttaaaacacaacttcaaaggtctaatatgactaacttcatttaacaaatctctaaacaaggaaaataaggtttgcagtacccttttgcaatggagaagtatacagaaagatcaaagtatttccaaaagtattatggagaattatttatgtcttctaaaagattatatccctgtgcagtttcctatgataaggacctggattaactttgttctacaaagaaagaaagcctgatgtattatatgcttttccactgcctccttaagtggagccaaagaacaaagcattttccaggaggaatgaagttgtatctgtcctcagagctgcctagagatcaaaagaatctttctagcagttttattggaaatttcagaggcccttaactaatatttagcttcataaatgatgggtgttacagggtgggaaaaaattcccacttgtaaactaatgggtggttgtcaatcataatttttgaaaaatgttacttaactcaaataaatatatttctgatttctccttgttagtatgatggttttcagtttgtttacaggtaatctctcaaaccattgcttatttcttatctgcccaaaggtaaataaattgtggtaaagcagcattctatttttcagatgggaaaaacgtacaaatgaaactctgtgagcctattcaactcctggggctgctataacaaaggtccacaaacagagtgccttaaacaacagacatttgttgtcgtcgagttctgaaggctccaagtccaccatcaaggtgtcagcagggttggttccctctaaggctgcgagggagaatcagttgcagcctctccctggcttctggggatgctggtgatccttgttccttggcatcaccccatctccaccttcgtcttctcatggcactccgtgtgtgtgtgtgtgtgtgtgtgtgtgtgtgtgtgtgtgtgtgtgaaaatttctcctttttataaagacgccagattagggcccaccatagtgacctcatcttaacaaattactcctgcaaccaccgtattttcaaatgaggtcacattctgggactctaggggttaggacttcagcatgtgaatgtcggggagacataattcaatcataacattcaggtaaccatgtttaaggccatgcctaattttaaaaaatcaagaataatcggttgcagctgatgattcctcgtgtgactcttgcctcctttagttcttagaggcccatttagtctggggtcatcctgaaaactggtgccaggcaagggagtctgcagccacaggagtctaaccgcacagggctgctttatctggacagttcatgacactggggcctgatgcttcctggacctgctccttcaatggcgttggctcacatgctggggccaccatcgtcccctggtgaggtcggccggcaatttcttcccacagagtagctggcagcatcctgtcccagccctgcctcattatcagtcctggtctcctggcctgcaggtctttgttcaaactcaaaaagatgcttgaaccaggtgactatacactcacatcaaatacacagagaaaaatattttgaagagtaatgttacaaaatgtgtaattcctaaagtatacacgtgtccttattaattggcatggttttgatcatctccacattatttttccaggtatcctcccaacttgatcgtataaacctcaacgtattggagttctgagcatgccagtgtcctttcttccctggagagacatttctggctcttccctaaatgcaacaagaccctgtaactctacagagtttttcttattaaactaggatacgtgccagctgcacttgctactccactaatagccacttgagtcccttttagcaactatgtgatgatcaaggagtcaggagtcactatctcacctcctcctatttcttctcggcctgttggggtggcctgatctgccccggactttcccatttcagcactggtgtccacgttctgagacccctcggtcaggcacacctggacagtccccctcctgttaatttactttcttatatttgaatcaacacagcccaaatattattggcttgtagttaagcagaatttaaacagatcctatccctaaaacaagcaaaaaaagtgaagtacacggaaaattagttaccccttcctcataatttttctggaataatagggcatcagtaatactcctaacaggtagtttcaccctacctgggccttgctggagctccagtcctgattctgcagccgtcttctacacatctctgtttgtgtatgccatagccctgctcaaacccaggctgtttcaacagccccaaacctcctgagctctctttgtttccacccggagctcacctcttttcttcctgctctcagtaaaaaggcagtttcctttcttttctccttctcagtcagcaaatcatgctgattcttcctctcttaataacaataacttagtttatgtgatgcttcctgggtttacaaagggctcttgtaaccattcagtattagatcttcatcgtgacttagtgcagtgaggtggtgaatgagaattacctttattttcagatacaaagaccaactcagcaacaccaaggctggtcaaactcacatcattaagtactaagtagtaaatactggctcttgaatgtgggtcccctttcctacgctgtttcttctttttgaaagactctgatgttctctgtgtgtgtgtgttttctcactgctgacaccctagacgaagctgtcaccacccgccacccagatcatttggccctcactggatttcctggctggagagtatcttcctccagcaatcctatatactagaaccacaaaccatgggtccccatcatatcccctctgttataaacctcagtctctcatcaccacacacaggaggaagtcttcaatccctttctggtgaccaaatgctttcaaaccctgccccacttctgtttggctttaccactcggaccttcaagtatggactcccaatccagcccaccactgcagtctccaggagtgccacgcatcctcaaccgcacgtctttgctctccttttgctgggacagtccatgttccttctctgaacaatccaagaccttttatttcaactcatgcatggctccaccttaaggtctccctcaaccactccagcccccatttatttccaccttcaaccaagtcctgcggccggtttgcagatacaagtggactcactccttacccactatcatcccttctagtgacctttatctgcaaatttggtgaaaactatgttttccattctcattagcagctcaggttctctctggtcagtagctatgttctaggcagtcacccaggggagacttggaagggagctccctaggagcacccaagaaacacacacagctgtggcaggcatgaggtttctcctgtaatagttccatgctgtgggtgggtgttcctcctgctgtgttgcacacaagcatagctctctgaacctctttgaatttccacacactacctgacaccctacagcttacagactttcaatgaactagactgaattctgttgtccagaactaagaactccgaggcatacgctataatgctcctgctaattttggtactccgtcgaataccaccttacattatacctttttcatttaaatctctaattggtcagatactccagcccccagcagatatatgtagctccttcggccttcaggtccacaacaagaaaccggcaattgtgccatgccaataatgctattgggccacagtggctgagcagagatcttggaggggaaggaggaagagtaaacactaggacatgaacctggagcacccaccccccggcctgggactctgcttttcagtttctctgttagattccctcctgacttgcctttcttggcaatccatgtgtctgggtaggaagaagagcctggaggtgccttccacttggaaggggtctccagaataaatcaagagtcaagtgggaaatggagcagggaagccagataacctgcctctggcttcaagccatgtgctggcaagacacagataggttttacaccagcatgttaaaaagctggcacagatggaaacaaaaacactttattcttccatcacagcaggtgttcatatagaaatgcattcacttcttttaatcagggtagaggtattgagggaggaggggggacacagtacagatcagtgtatattgtccagactcatttcttaatttacatgtatttttttctaaaatataataaacattgctttgtcattcttcccctgttcctcaactgtcttttgtacccatcataaaacttgaatccattgacttgttgccaggtgacaagtacttgcaggctgggtccttccctttgttgtgtctgtagtgttcatggctggatcagggcttaggacatatcggggcttaggacatagcaaccacctgtgctaaaaaagaagttctcctgtccagtttagtttaccaaggattgaacttccttagagaggtttaacaccaatgccctggacataatacaccccgtgatctcgtctgctcctgttcagtgagcctctctctttctctctatctttctctctctctctgtccctggaagggttgcaggaagcagagcagggagtcaaggatttgatccattcctggccacacatggtcataactaagataactagcccttgcctacaactgcagtataaaccacagaagggcaggcaacaggctctgggcttcagccgtcactttgtctgctatctgctaattgtataaatactggctgaacaaatgcacttaacactttacacctcgaaaaattcgcatggaatccattttcatttcttacttgatgagaagaccccttccggagttatgactttagaagtctggaaattcaatgtggcacacatatgctgagatcccagcataggagaactaaaaacaaactggggtgattttttaagtaataaaaacaacaataagaactctaagccatatacaaataactgatggggaaaaaaaactctttttagcaaattatatcacagccaaaagtaaaataaaattcagtgttattttattatttttactgaattgtaattgtttaattattataaatgggagtcattgcaaaaaaaaaagtcattttggtcatagtagcccattgattaataagttccactgaatgtttaacaatatacagaacattttaaacaaaaaagagttaacagcaaagaatacatactccttgatgttggtttcgcttgtagctctaaatactgatggaaaacctgttccctgtcatagaaaactacttctctaagcacttgcactgcactaattgatcttttaattggctcagtcaacactctagtctttctacacaacaagttctaattgctacatgcaactggagcaacactcagattatcaagaagacagaggcatcctatcaacctctgcttcaagcagtgtgctggcaagacacagataggtgttacaccagcatgttaagaagctggcacagatgaaaacaaaaacactttattctcccatcacagcaagtgttcatatagaagtgcattcacttcttttaatcaaactaggagtattgagggagggagcaaacggtatagagatcaatgtatgttgtccagactggtttcttaatttacatgtatttttttctgaaataaaataaaggtgcctttgccattcttctcctgttcctcagctgtcttttgcacccataaaacctgaatttatttacttgttaccaggtgacaagtacttggaggataagtcctttcctttttttgtatctgtaatgcccatggctggatcaggccttaggacatagcagtcacgtgtgctatgaatgagtttacgtctaaaattcactcctatttgatgaatgtcttttctaattaagtaatagcaagcaatcagtaaaatgttataataaagcaggatttcttaacgctggcactattgacatttggggccagatcattcttctttgctgggctgttctgtgcgctgcaggatatgtggcagcatccccagcctccacccactagacaccagtagtacacagtagcccccctaaaaatcactgctcctgttgagaagtcctggactaaagatgccatacatacacagatcagatactttcctacaaaactacgcaattcaggcttattcatttcttttcgagaagttgttttcactaaaataacactccctggataggctcagaaatgaaacagagaggaaggaaaaaaagctgatctaaagtgatctaaatcaaacaacttcagtggattattaaaagcagtcacaacaaaaaatgaaaatgaaacaaaaagccctcgtaatccacgtctctctgaaggaattgtctgggaattatttaaccctccacccagcctttctgtgtgtcattctccatccatccttgatgacttgtctcctaaggagcttgttaggagttctgaatgcagccaaggaggagtcaggtctctcactgacaatggattatgctggtgtaaagcatgctttccaatttacagacagaagaaaatgaatggagaatggttctttaactcattgattcatttgtgtccttatttcttccctcacacccttcattccttttttcctccttgtgtttctcgtctttctacttctctttctccttttccttcttgacttctagactctttcatttctctagataaacatcaatgttttctatctaaatgctgaaattaagaaatattttaaaaatagttttggaattcatggctttaaaaaaacacattcaaggcagcaatctttttttaattattattatactttaagttctgggatacatgtgcagaatgtgcagatttgttacataggtatacacgtgccatggtggtttgctgtacccatcaacccatcatctacattagggatttctcctaatgccatccctctcctagcccctcacccaccaacaggccctggtgtgtgatgttcctctctctgagtccacctgttctccttgttcaactctcacttatgagtgagaacatgcggtgtttggttttctgttcctgtgttagtttgccgaaaacgatggtttccagcttcatccatgtccctgcaaaggacatgaactcatccttttttatggctgcaaagtattccatggtgtatatgtgccacattttctttatccagtctgtcattgatgggtatttgggttggttccaagtctttgctattatgaataatgttgtaataaacatacgtgtgcatgtgtctttatagtagaatgatttataatccctctgggtatatacccagtatggggtttgtgggtcaaatgatatttctagttctagatccttgaggaatcaaggcagcaatcttaatagtgtagagttaaacctcttcaatcacgtttataaaaatgcaatgcttcttccaaaaaatggacttccattgttggctctttaaataacgagataaattcatacacttacatgcacatacacacatgtgcacgcgcgcacacacacacacacacacaagaaaaatgaactctggcccatcacagtactttatatgtattttaaaatattttgaacccaagcactaaacaccctgaaccctaacttagcattctgaacttcacagatactgtggagtgctttctgtgtaagattgaaagccattttaacagagttcctcctgaatcaaccccactgttccttgcccttgtgctagcttcctgactggtgtccagctgcatctactgttaggcttctgagaagcagcacctctttcctgatacaggtgatccactttgcagactttgcttgatgagagtccaactctgcttgtgcagcctgataaattctcctgggcttcacttcccacatagaggggggaactctctgtgaactgaatccactgtgcctcccccacaggattcctggtgaaattaaaaccaataatgcatcagaagcacatagcacagggctgggcacatggcctgtgctcagaaaatgttacctgctactgtgcctttactttcttatgttgcctcctattgttgatcatttggattgttagcaccaataccagcattgtcatcctgaacactcagcacttaccatttttgccacttagtcatgctcagcctctgccaccttgccttgctctttatacttagagagcatgccttgtgtccccaactttatcataagttgttgcaggatagaaaggaaatcacgcctggtagatgtaaaataacccttataaccagcacaggacagggagagagggctgcagatacctatgttgtttgggtctctgtaaagagaagctttgctcaccctgacatttacaatggacaggagctcactctgtttaaacactgtgtgtgcagaagctttcctgcctgatcttgtgtcatcctcgcagacccattttatctgtattttgcagggatctggggctggctgaggagaggtgcctgtaaatgagaaagccaggggtggaagtgcaccttgaacctactttatctcactcactcttacctagtgccaagtgctgccctaaataattcatatttaagttatttaatgtcacaacttaataattcatattaattaattcaattattttaattaatataatttaattaattgattcaatttaattcatttataattaatattaattaaatatgaattatttaaatctatatttaagttatgtaatgtcacaacttaataattcgtattatgtcatttaatgtcacaactgccactggtggtggggcaggggggttactgtttttatcccattttatggataaggaaacacttacctccctatctttgtttctttttttttttttaattatactttaagttttagggtacatgtgcacaacgtgcaggtttgttacatatgtatacatgtgccatgttggtgtgttgcacccattaactcctcatttaacattaggtatatctcctaatgctatcactccccactccccccaccccacaacaggccccggtgtatgatgttccccttcctgtgtccatgtgttctcattgttcaattcccacccatgagtgaaaacatacggtgtttggttttttgtccttgtgatagtttgctgagcatgatggtttccagcttcatccatgtccctacaaaggacatgaactcatcattttttatggctgcacagtattccatggtatctttgtttctaatgtccatgaattctaagtctctcctgctgggaagaacaaggaaaagaaggatcctgagaagagaaggagacgtggtgcaaatgtcagggacagagggaaggttttggcatgaagccaccttgggaaaaagagaggaagcctaaagaggaggctccgaagctgagtcctccacccgccgtgggaagaatggcgccgccgcacgtgcgtgggacagggcgatgccacctgcgctgggtgtgtgctgggaactcaagaaacaactttcagttctaatataacataatgatgaactcaacatggactcaagtctgtttttcctcctgctttatttttagttagggtacatgcaagctactcttgctctttggatccatggctgaatctggacaccagcagtgaccagctctagagtaaaaaaatcaggaagggggctggccacactgggttggagaatcagacttggggataccatgccatgaggtgtgtggcctctgggcaacaaaacaacaccagtttagactcatctccttgaaacagaaggaaaagccaggcttgaaaacatgggttagaacaaggaatcttgggccaggcgcagtggctcaggcctgtaatctcagcactttgggaggccgaggcgggcagatcacttgaggtcagaagtttgagaccagcctggccaacatggtgaaaccccgtctctactaaaaatacaaaaattagctgggtgcgtggtggcgcgtgcctgtaaaaccagctactgggtaggctgaggcagaagaatcgcttgaatttgggaggcagagggctgcagtgagccaagatcacaccactgcactccagcctgggtgacagtctgaagataaacaaaacaaaacaacaacaacaaaaaaacaaggaatcatggatgaataactaacttagcatgcagaagatgtcaacaataccgtgtttaacataccagctgtcttgatttagggccttccaagagttaattctctttcattctacattccctgtgaggtttgcatttctcaggtgttgagttagctttaaggagaattcttagacacctaaacctcacagagagacaccatcctacagccacacgccatttaagcgaactcatttgagaatgtttcaggcttgcatgattggagtgggtggggtgtggaccctagattctaagacagaaccttgcgcttaaggaattcagagccaaattacaaactggctggagaaacacctcaggtggatctaataggcccactcagaaagcagaagaaagctgtgtcctagagtgagcagatcctctgtggaggaggagcccctttgaaatgaaatgacaaagggtgaccagggttgagtggagcgtctagacatggaaagtggtagaaatgattacggtactacaaaaggatttacctcagccctggttcaatcctatctcctccaaagtgtcttatttgaggctttttttcccctctgaatacacatttctagcttcataataggaaagaagaagaaaaatgaatttatttcatggccaactttttgtggtgagagataagaaaaacagactttttaaaaggttcacatttagcatttgaagaaactgaattctgaaaaacgtgaattccttacctgggttcacacagctcgtttgggaggaaatgtgggtgaaagtacaagtctctggcaaagttggaataatccagcactctttgtgtaggaagaaggcacaataggaaaatgtgcatatgggcttctttttttttttttttttttgagacagtctcgctctgtcacccaggcttgagtacagtggtgagatcttggctcactgcaacctccacctcccaggctcagattatccttctgcctcagcctcccaagtagctgggattacacacatacgccacaacagccggctaatttttatatttttagcagagacagagtttcaccatgttggccaggctggtcttgaactcctgacctcagatgatccgcccgcctcagcctcccaaagtgctgggagtacaggcttgagccaccacacctggccggcttacttttaaaaaaacagtaaaaatatagaaagagggaacaccaaaacagtaaaatcaggttacctacaatgggacgtaagataccagtgatgagaacatgaaaacgtgaagcttttataagtaaaactgtaatattttgatttttgaagacatgtttagagtccacacatttttagaaaaaaattagtaagaatgaggaggagaaaaaaaaaaaactaaaaccaaaagcagactgaaaaaaaagaagatgattgtatttcaaatgagtaccagacaatgataaaggggaataaagaaagtgagaaagcaggaaagaggtactggaaagaagggaaggagggaagagggaagcaggggcggggagaagaaaatccaagtaacctgaaggagggaaaatccaacaaatttatgaacacagtatctgactttagaacctctgttttgggtagagtggaatgggaacaggagaattgcaaacaaatcctgactacttgtaataaataaattagtaattaggtaataaattgcattaataatcagatgaattaaaattcatctaatcaaaagaatttcttgtagtgtatgggcaaaaaaaaaaaaaaaaaaacaaatcctgtgaccgttttggatgtattgaaagaggagcaaatataaaaatgtgctgatgtttgagaaccctcaggttctcaaacaggcactgcagggttctcactgcagaaaaaggaatatgcaaatatgtaatggaagaaagaaacaagggactctgtggggatagatttgaattcgaggtactggcatgaagtcatgatttctaaaatatgcgtgcttatgtagatatattttgtgtatatttgcttgcatgaatatattggaaatatacatatacatgtatatatttcttctctgcccattgaaagggccaagaaattgtgagaggaaaataaaatctcagaaccccaaactccctatgccaaacggaaagttaagcttaagaactaagcctctcaaaaaccgcctagctgtaatttcacacgcttactttgtcttatgtaaaatgcagatttactgagcccgagatgaatgcacaattgacttttcctcccactcctttctctccacatgtaaaatgtagatccactgagtgccaatcagagcctcacaagcatgaaaccacttgcctcattgcctaccctccccctggccctcctgctggttctttccactttaaatattgaagccctctaaaccctctggaaaaagcacagatcctactgtgacttgtgtttctttttcctaggtgcatcctcaacgttggcaaaataaacctttgaatcgactgagatctgcctcggtcatgtttaacaaaaacaaagacattcagtagctatgagtactcctagagctcagctcttcactgcaaatgccatcccccactaaaaggaacaagagctcttcagaggaatagctaattccagggcttggggcagggtaggtcagcatgagctggaaaggaagaaagtagcttatagaatgagagaactatgttgtaaggacacaggagccaccaacggagatcccagtggccaaattgtggacaactggaatcccaaaataatgcaagtagaataatgaactattgacaaataggaattcatgaatacacaggcataaaaagtaaggagagagggatggatcctatagtagaatgccaaaatctgactgacagatgtggaaagcatgtcggagttggaaaatcagcattctgcaataatcatggcaaagactggatcaggcaagtattgtcaatgcgtgtatttaaatctaaagggatttttttttatgagaatcaggatattttcagggtcttaaaatgtcatcccattgactgcttattagttgcaaaggagagaaaaatagtaactcaacagtgaagatatcaaactccactttaaccaagtgatcaatgttaacatcaccaaagagggctggatggccgttgagtgtccccagatatggtactctgagaaggacacaccattccctatgtagtatttcagcatggagcacatgacctgaatgtaatcacacacagaaaaaaatcagagaagcccacgatgagaaatgttctattaaaataagcaggggcatgggctgactatattcttcaaaatgttaacatctcaaacacaaagaaagcctgtggaaatattcctgattcaacaggggaactaaaaagacaagacgatgaaatgcactacctgataccagagggatcctgtactgcaggaaaaatgctctaaaggacattactgggtcaacggacacatttggaacataaatggtagattagataaaacatgttatcaatgttaaaataccaaagtagataagtgtaccatgattatgtaagaacatatccttattcttaggaaatagcccaggaagaatttaggcataaaagggcatgatatacgtaacttaccctcaaatagttcagaaaaacaggtacgtgtgtgtgaacacacgtgtatgcatatgtgtgtgtgcacatgtacatttgaatggagagagaaaaaacacaaaggcaaagcaaatggtaaaaatgtgtgtgctaaatgattcgtgtctgctcttcatgttattttcatttttgtaacatgccttttagttagaaattattttcaaataaaaagtttgaaaatgatgcttgtacacactgaatgcatctacaaatggctgtcgtgaaacagcccattgtcgtgatgttgctgagaggccatcattaatcaatacatatatattaatatgtcattcctgatgttttacatcacattttaattgtccactagagctttgatttccaaaccttgccctttaatgggttgtatctgaatcccctaggatgcttttaaataatagaaattccaggaacccggaacctgatatagaaggtcttgtggggggctcggaatctgtttttcaaacaaccactggaaagagaatacatccatgcatatacttatgagcaacatgttctttaaaattccacccaatttttgtgtttgtaaagtgacattccaatcgtgtcagtccttcacacttgcactgtatacttaatctcttttgattctttcctatagaccatcacttcaccctggactgcccaggcatcatccactgaatatcccccgaggccaggttaaacattggttcaggacattctattccctacatccctcactcagtcgtcctgctttcactgttctataggctaccacatgtatcagctctattccccttctgatcctaatcacccctgggatcaaatctgagctatcatcacaacctccacgtttcacctattagagaaatgatcctcaggtagaagggcttgttatccttccagacgtctctgtgattctcaacctgcctggtcacctttcctgtttgttccttcttttttatcaaaacatctttatatgttacagagagatattacacacagcattttgtttcagcacagcaatttgttcatttgatcgcatctaactgaagtatctgtcaaggatgagataaacgtggtttcacaatggggactatcacccaacctggcagtctcacctctcaactgccttctgggcctgcctagataaaagctgttgttctgtgctgtaaaataacaaaataacgttggtgtgtttttcctccccaccaaatagcccacagccattctcctaaaattgatgacgttttctttttttgacaccttctttaactggttcagttacaagcttatctgattttgatatcaatgtctcaattccagcttaatccttaaataagtaatgaatgaagcaatgactcaaatggcatcaccccgttttatggacctgagcatgtttcacacagtgcgcccgctgctcaacctcatgggcactgagttttctgtgttgtagtgaacaagttttcagctaaaactaatcaaggaaagatcaacaggctgccctacaagaatataaactacaaggaaattttatgatgtgtgcatacacttgttatctaaatacttgtttaaaaaataatagaaggttcatcaagtctcaacatcttactgaatcaataaaaattcaaaatgcctgtgttttatgagtgaccaggagtgacctttccccacctctctacccaaggctccagggtaatttgaaaatgacagctctggatacagtagtggttctccaggtgtagtccctggacaaacagcatcacccaggaacttgttagaaaagcaagttcttccttccacacgtccacgtgttctcgtcatttagctcccacttacaagtgagaacattcggtatttgatttttctgttcctgcattagtttgctaaggataatgacttccagctctatctatgtccctatgaagaacataatctcattcttcatggctgcatagtattccatggtgtgtatgtatcacattttctttatccagtctatcaccgatggacacttaggtcaattccatgtcttttctattgttactagtgctgcaatgaacatacatgtgcttgtgtctttataatagaattatttatattcctttgagtatatacccaataatgggattgctggggcctattggacagtagagggtgggaacagggagaggaccagggagaataactaatagatattaagcttaatacatgggtgatgaaataatctatacaacagatcgcatgacacacgtttacctatgtaacgaacttgcacatgtacctctgaacttaaaagttaaaaaaaaaaaaagaaaaacaagtactcaggccccacccctgacctactgaattaaaaaagtctattatgaggcccaacaatgttttaacaagccctcctccaagagctacatcattgtccaggtgctggagatctcaaggctgatactagcttcacgaattctttgaccaagtgaaatcaaataggaaaagagaatatacataagttttctaaagtttttcttaagcctaaactatgtgtttaactatccaattaaagttgaatattcattatttttcctgttttttgaagttattatggagaacatttgctgcattctttatttggctggagatgcttatagtaaccaaggctgagttatggtgcttgcctgaggtgcaaattcaaaggcacaaaactcataaatcaagatgaatattaatgcaatatttaaaaagtcaacactaatccaaacaattatgatgaacaaaataacaaaattataaatggagattaggccagcccggaacttttatgactaaccctcttacatcactctaatcctggccttgttagtgataacctcatactatcatcaatacattgtgataaccttggaagaggagtgtatcagttgtgtctcatatatgctcattttttcctgagtgttttgccaatggcatggtcatagatggcagcgtataatgggagcagagaggactggggaccagctaagtggagcacaggcaaagtaatgttccagaagcctggggaaggtgccatccggggggacctaagccaggatttgaggtagacgtgggagagtagaaacaagtgggagactggaaacagctgggagtgatggacataactatttgccaaatgccatgatgggacagcgattaaaacaagtaaaaagtcatggttaagttcacacaaataacaggagacagaaaaagcctgtgagccataaaattaggcaaagctgaaaggagggagttggccttgagaccaggaaagaaagtgggcctgcactagaagagacagtcccagaaggtagcatgacatatataaaaagtcaagatgccaggcatagtggctcatgcctgtaattccagcactttgggagtccgaggtgggaggatcgcttgaggaccggagttcaagatcagcctgggcaacatagcaagatcttgtttctacttaaaaaaaaaatttaaaattagctagctgtggtgtctcagctctcacctgtagtcccagctactggagaggttgaggcaggaggactgcttgagcccaggagttcaaggttgtagtgagttataatcatgccactgtagcccagcctgggcaacacagcaagaaaacacaaaaatacaagtcaacagctaggacatcgtttggaactacgcatacgtatatagatctgcaaccagcttttttcaattagcaatatattcagagaaaaaatttgtatcagaaaatatggtagtgcttcattttaaggcaacgccatggtatctgtattagtcaggactttccagagacagaaccagtaagaatggatggatagagatttgatacacagaggattgactgataggtagacagatgacagatagatggtagatagacagacagacagatagatagatagatagatagatagatagatagatagatagatagacagacagatagacagacagatagataatgtgatttattttaaggtatttgctcaggggattgtagagcctggcaagtcctgattctacaagcaggttggcaagctgggtcccaaggaagagctgatgctgtagctctggtctgagggcagtctggaagtagattttcttcttcctctggggatctcaatcttcttctcttaaggccttcagctgattggatgaggcccacccatgttatggcaggtaatacactttactaaaagtctacaatttaaagtttaatcatagctaaaaaatagcttcacagtaacatgtagactggtgtttaagcaaacactgtgcaccatggcctacccgggcaacacatgaaattaaccaacaataaccatgaaattaaatgtaaccattacagtttagccacagtaatttctataaccagcttctgattgatacagatttttccttatttttccattatcatgaataatgatacatacaaataaaaacattattttatatgataaatgatgatatagattttatatccatatatgacatgatactgttacatgataatattgtattattttaacatgataatatagatatttctgttgcatacattcaacaaagtggacctgctgctcagaaggtatgtgcacttaacaaatcataatggatactgtcaaactgcctcccacaaagcttcattccacaacagcatgtgagaaagcttgtttccctacatgctcttggacactgggtatttccaagaatcacaatatttgccaatacacttttcatgagcatagccaagggaagtgggtagaaatgggagcaagagcagtagtggctggagcaggcgggccctgggactttctccacacagcaagcatgctgcccaccatgagacattagaatgattcaccaaggcagtcaatgtcttaaaaacgagaagcacaaaagaaaggcattatgtcactcagggaacattggcacaattttctttcttgagatcccagctgatcctgcctcatccttctgcagaaattacaaaaggagtcaccccagggggattctccttcaaaatgttctttcaaggacacttttcgaagaggaagggaactggattagaccactcttgcatttctacacagacatacaagatgggaaatttataaagaaaaagaggtttaattggctcagggttctgcaggctgtacaggaagcatggtgctggcagctgctcggcttctggggagaccccagggagcttttactaatggcggagagcaaagcgggacactttggtatcccatggccagagaggaagcaagagagaaaggagggggatctaagttccttgaaacaaccagctctcatgtgaactaagcaagaactcactcatcatcaagaggatgacgctaagccattcatgagggatctacccccatgacccaatcgcctcccaccaaaccccacctccaacattgggaatcatattgcaacatgagatctggagaggacaaacattcaagccacatcaggaacctgcctgagctgctgggaactcaccctcatctaccctctagccagaagctccatgtggcaggcactgttcacacactctatgtgcattgacctaaatgagttaagtagaatgtttctaacattttagagatgaggaaactgaggcacaaggtattcaggtattgactacgatcatacaattgaaaaattgagaagccaaaattcaaacctatatggattgacctggggcctgtgtgagaggttccacttacatctatgtaaggtttcaattgaagaaagggctcaaaggcaagaaacatgagcaaactgctgctctcagtggcgccagaagtgacaccctcggactaggaatttgaagaaaagctccagagtaacatgccaggtacacacacatgcacacaggtgcatgctggttcatgaaagcacccatacttttcccactcaaactgccatagcatccaaagtctaccattagaaattcatgcctattcttcactaccctttcttcttttaaaattcaaattccacatcatgtcagattacagcaatcatcagtttatttgatccctgtgagaagatgatcagattcaaacttagggataaaaagcaggagggtgctgggtgaacttagaagggatggtgctaagagaaacatggagtgctaaaagaagacccacagatgcattccaccactttctggagtgttcagacctgtctgaggatgtctggcagaatggtggggtgcagctgcctggagtcaatttgcatgcaggacccaggaacattctggaaaaaagcatgtgcagatgtaatacaaaggtaagcagataaggctggcttgaccaagtgcctgcttcctgaactttctgaatgtagcagggtctgttttcactacagatttcctaagacatctgtgcgtaggtcctgccttgatgatcctctcatggcacacagtgaccaagtgggagagaagcttctccacacttaagaaggcaccttgggtggagagaactccagaaaacagactagcctcatcaccccaagacccagagatgctgtagagtgctggtgtgccagtggtcatgggcagaaggaaccagggcacgagtgctggtgcccaggagagccagggtacctaggagaagaggcagaggtcctctgtgaacaggctggtggtaacagaaagcagtgtttgatgggtgtatttgagagcaccatcattcactagtaaatacttgctcagaaatatgtgagggagacttaaactgagaactagagatgaggaggtgaggtaatgtcatctaggggaggtgacagcaaaatgtggaaaataattttcctattattatgagtgaattgtgtcccccatgtcccaaggtttgtatgttgaagcttagtaccccagaaagtggccttactttgaaataagatcattgcagatataattagttaagatgagatcatactggcttagatctacgccaaaatgactgatgtccttataaaaagaggaaatttggtggatgcagtggctctttcctgtaatcctagctctttgggaggccaaggtaggcagactgcttgagcccaagagttcaagaccagcctgggtaacattgcaagaccctgattctacgaaaaatgcaaaaaattatctgggcatgatggcacatgcctgtagtcctacctacttaggaggctgaggtgggagaattgcttgagcccagaaggtcaaggctgcattgagccatgattgtgctactggcatttcaacctgggtgacaaagcaagaccgtgtctttttaaaaagaaaaaaaatggaaacatagacatgcacacagggagaacaccatgtgaagatgaaggcagatatctgggtgatgcttcataagccaaagtaatgccaggttgccagaaatccaccagagtctaggagagaggcacacaagattcagcctacagcttcagaagaaaccttccctgctgacaccttgatctcagtcttccagccttcagagctaagagataatcaatttatgttgtttaatgcaacccaatttgtgggactttgttacagcagccctgggaaatgaacacaatgaggaatgtagctgcatttgtacccacaggccaatgtgacctgggtcagccaacatctgcaactagaagctcaccttgaaaatcgatgctccttaaactcatcaccaggacctgattatgatacagtcagccaactaattactgccaagaataagaaataaaagttttctgtttccaccagagtaagaaggtccagctgttccattaggagcagtgattaatccagttttgaagagctgggtatttcctgttgagctaggtctttcctctggggaaattcttatttttcacaaccaaggaagaaagtcttattcactatatggcaggaactcaagaaacatggtattgaggatgttgatgacagagatgatgggagtagtagtggtaaaaatagaaattagccatttcttcaataatcttcactataagagttggatggagcacaaccatcttccatggaagttgttcctgttttctcatttcaccttctgacatcacttgtaaaatgtatattaagacagcagcatactattttttgaaatgagacacttaaaataccctgaatcaagtaaaaatatgaaaatctttaaattaataataaggacttgctggccttcagaacattcatttgagctatttttgatatgtgagaaagttgtgcaatctcgtctcttgtaatgtgactttcactagtgtattagagaatatgttattccaatttgcaaaaattatgtaaccaagaatttatttgctgtctttcatatgccaagcagtgtgtaatggagaataaagaaactcaatacgtggtttccgctctgaaggaccttacttgttaagcagggcaagaccttaagacaagaagcaataatgggtgaataaggtgaggtgatgaatttttcaagactaagaaagctcgaagaaggaaatatgcagtccttggagagacaggacccaaagcaacctcacaaaaccagtcctgttttgactgaagagtctgtctggcttagacaatccttttcatcttttggtttctagtttggtacagggaaaaatgtccttgatacgccaaagcattctcatgagaaatgcaccaaaattttttaaatgtgcatttatttgatgatcagcaaatgttaggtcaattgtggtaaaatgttttctgggtcgggcgctgtggctcacacctgtaatcccagcactttgggaggccgaggtgggcagatcacaaggtcaggagatcgagaccatcctggctaatatggtgaaatcccgtctctactaaaaatacaaaaaatcagccgggcgtggtggcgggcgcctgtagtcccagctactcgggaggctgaggcaggagaatggcgtgaacccgggaggtggagcttgcagtgagccaacatcgcgccactgcactccagcctgggtaaaagagcgagactccgtctcaaaaactaaataaataaaataaataaaaaactttttctgaccaaatggacacctgttggttttgcctactcagcacccatttccttgttgttgttgttgttgttttaatgcaaatattttcctttagaaaccacctctcacccaccctcagactaaccacattggctgggactgatcccacttatccctattttcctatgggccctgacagcagcctggccattcagagcagtccatgcctcaggccagacttgggctcaagaattggcatagctttgtgtatatggagccaagacgtactttgaaaagtacaacgttgtttaataagtatttaagtgcccttttcatctgccaatcaatttaaaataaggtattgaactactagtaaagtctaaattaacgtcataatattaaaaataaaacgaatatgatattcaaaaatatatcaatgtcttgggagggttttaaacaagcgttttagaaatactttagaaacaattatctgggccagacagatatagtgctttatggactgagttgtaggtttatgatccttacattatccaaagcacctgataaatcacagggctgtttcggctctttccaatggtcactgaaaactttgagtagatataattatcaatgttatgcacattttctacatattgaaagcactggaagctcttcctacataaagtatcaaaatatgaaatagtttgaaaaatgtgtcaggcttcattttatttgataaaatgctgtatttaaatataattaaaataaaaagtcaaaaccacattaaaactgtgtcaatatttcagcaaaaggtgattttttttcctcaaaactcagaaatctatcccatctcaactgatgttccacgggctatacagtatatttcctgtatgtaaacaagtaaaaataacaccagcacttctccagggcttctgtgtcaatatgttatcagaaaatatcacctatctctctcccctcttgggcttattaaaatgaaatttggtaagttaaatcaattagatgaaaaaatacttttttaaaaagttcaattttatattttaaaattagaagtaaaaaaactcatattgtacttttgctatgttgaaagcattgctcatttcttgataatgaaaagggaaacgttacatccagttgagaggaaaaaaaaaaaaagatgctgatggtgatgctgacttaaaataaataatcacaaatagccacgcatttgtagccctgcacttccagacttcccttcatgaaagcccttgggattggggccatttttaaaggctctggagtgaccagaacattagctaatttcagagagtacaaaatgaaatactatctatgaattccaataagcatcgtctctaaagatgacttctcagaactgcggaactctttatggagattttagctgggatgatggtgcttgtaagtaatctcaccccaaagcagttcattttcaagaagacacttacatcactaattgttctcactcagagagctatttaatgctcccagatcctccagcccctccccactgctctccttcgttccaatgctgtcttgtctcctaatgagaagcctgcagcatctatcagccctcccagaagccctgtactcccacctcctgcatgggaatgtataactgcagagggggctctgagcaacaaatgactcttccttagtgaggaacgagatagactaagagttcatggtaagaaagctcagaaagtataaacagagcaccttaaaaaacaatgaccagcaatttagtacagatagaagtaacagcgagttagtaagctctaaagcagaattgtaaacccctattcttcaaaaagcatagtacattctaaggaaaaaactgaattatctaaacactctagaaatctaaaaaagacaactctaaaccaaactaaatgtttctaccccaaagaaaagacaaatgctgatcttagagagtttacatgctcctagagatctttgaggttaaaaattccccaaatgattcattttgaccacctcaattttggtgagaaaggaagaagacagcttacgatattgaaattaatgtgcatggggagtattcatcctgcatggaaatcacgtcaaagaacaccttaagttgttaatttcatagacttaaaatactttaagcttcttagcatttataggaaaaattactacatttcatgataagctgaaactaaacattttcaagaattttcttgtatgaaaagaggaggagattaaaggtatctttcttgggatcatggaaagtcatcaaattgatacaaattgagtgttaactctttttctgttccttttattgtatatcccccagtcatttatcctctttgtggttcagcgcccttctttgtggaatcaagctgttttgaaagtgctagattctctacccaggaagatagtgtacattctaggagtaagtgagcccccactgagagatgtgtgaattagccctactgtgggatggcggacaatgtgtaaactctcctccagtacacacacacctagtaatttagataattctattagccatatgttgctagagatttccctttcccataagcaaatcacaacgaagggaaaggttgtttgagcatcagccaaaaaaataaaaataaaaaataaaaaaagaatgtttattgatggctttcattgtgctagattctgagactccgtgagatagcccattccccctgggttttacccgccagcccgggagctatgacacaaattccgggagatgaactgagcagcctcagctcagtgttggctgtgaaggcaagaggcacatgctctaggaattccagaaaggaggtgatacgagggaccgggctggacagcaaacagcattctgcagaaattatatgacttttttttaaagacctttttatctggaaataatttcaaacttacaaaaaattacaaaataccacaaaggtctcctttatgtcttcaccagatttctcaattattaacattttgttatttttgctctgtcattttctaccttatgaatcatttgagagtaaattacagacaagatgcctctctactaaacactttagtgtgtatgtcctaagaaggacatgctcttacataagctcagtgcagttatcacagtcaggaaatgatcattgacacaatactctcatctaaccttggagatgactttttaactgccccttttgcacagtttctcctattccatgggtttctgtgtattcaaaacaataaaaaacaaccctcatttttatttgggtcttaagagattcccaacagggagagaggtggacctcaaaccatccaaacctcagtccaaagagtctccaataagatggcattcaactctcaaaggaaacacattttcaactcatcatttagccagcttcatttctcaaaattccctctgacagcaaaagttttaacagttaagtttctgccagaagagttgtctagcagttgttcccgtcccctgttcctctgtgccagcttcctccccctccctgtctgccccatgtctgacaccgaagccacatcagacgctgggagaagaagcagacacacaccctgtcaacacatctttggctgcccgactctcagcacagtagtggcggggggtcaccagcagacaggatgcttcccacatggggatgatttaatccccagcgttttcatccagtgcaagagagaagcccgctgcttgtgggccaggtgatgggaattaggcaggagccgtggtaagaataaaggcgctcctgagtgacaggcatcacccctccttcactggggttttgccactgtaaggctcaaaatacccgacaacaaaaaacttcagaaattaatctgggattttcattttaaaaagactttttgagcccttttaggcagatgctgaaatcatttcaacatgctcttccataacaaggttcagtgttattttaaaaaattacttggagcagggtgttcatgcttggtaacagatacattttaggacttggctcctgggatggcctgttaaccaaatacaatcatgtgattattctaatgacacatctgggtccttccagaaatgtgaaagaatgaacaatctaataaccaattcctggaataaatcacatgtgcttttccagaactttctcacaacctaatacagttttcttccattaacaaaaggcataacatttagcattttctctggcaaactgaaagcacaaagaacccacaaaaattaaaaaagtaagcgcagagaaatattttatgattgttttatagttttatttatgattagttgaaatgagaacttgggtcttttttttttttttttttttttgaaacaggatctcactctcttgcccaaactggagtacagtggcacaatctcggctcactgcaatctctgcctcctaggttcaagcaattctcctgtctcagcttcctgagtagctgggactacaggcatgcactaccatgcccagcaaatttttgtatttttagtagaaacagggttttaccatgttggctgggctggtcttgaactcctgacctcaagtgagctgcctgcctcggccttccaaagtgctgggattacaggcgtgagccaccatagccagccaaagacttaggtctagacactttgctcaaaatgcaacccaaagattagcaacatcagcatcacctgggatttgttaaaattcagactcaggtcccaccccaggacccctgcatcaaaatttggattttaacaggatgtctgagtgatctgcacacacactaaactgtaagaagccattttttaaacaagtgtgccatccaggcaaggctaaaagaagccaccagagagtgaagaaaatcccaacagagttcgcagaagaggtgggggccacagtaaacttaaggagtatcagtattttccaaagaaccaaaaaactaatatcccacttaatttatccaaaatagagttaccagatatagcaaataaaaatacagggcacccagtcaaatttaaatttcagagcagcaatggacaattttttggtatgtcccaagaagcatttggacacatttttaccaaaaaattatttgtagcttatcagaaattctaatttaactgcacattctatattttatctagtaatcctatttcagagactctagattaaaaagcaaattgcaaatatgtccttctgaatgaaggtttccctaatagactttgacgaactttgctaaaagaacgatagccttttctttccttagctatttgtatttgtttttgtcttttttccttcctttctccttccttccttccttccctttcctttcttttctttctttcctttcttttctcctttcccttcccctccttccttcctttttcttttctctttcactccttccttccttcttttatacccgaagttcatcttatttctcatgtgttcctgagactgtagctaacctattttattctcttaccagaacccaggcaaataagtgttaatctggaatagttctacttgttgtggcatgagaactgctcacaactggaaaaaaatggtttttacttactgggagcatcctggctaaatttgtaaacgcgtccctccgttaccaataataaacgacgtaggactataccatccaaatagctaccttccaatattttaaagtgcttaattatgaaatgacaattctaagaaaacttaataaaatgtagaaaatactatacagttcaaaagcaagattttaccttctaagaacagaatgaaaacaatcaaacaaaaattctgaggcccagtgatttcactcaaatgagaaacacagaaaacaatgagtagggccaatgtgcagtaaaaggcaccttacattcatggaaaaggaaagaattcaagcatgtgttaaaagggcaataaaataaaaaggagaaaaaaatataaaagcctattaagccacaagaatgtttcttttgatgcttatttttgtattaaatagcaaaaggataatgccatcaattaaccatgatcttcataataaaacagaatattttacagtcaaaaaaaaaacttggaaaacccagcttttagttcccatgcaacatcctcaaatcactagaacaagtgagttgctaattttcttctctgttacaacaacagaaataaaatctagcagagaacaaaacagttaccatacccacaaccaacatctctacgcatcttttttttttccagctgctattcatatcaagtttaagaagccaccccataagtctcccagaagtctctgaaaaataaaaataggcagaaaagatgattactgaggactgtgagtgggaaaaccatgtactcaatttgttcccaaagtttttcaagaaagcaagatgattttagtaacatatttgcgctgattcctctaaaaggaccatgcaccataatgaatgccgagtagtggagttggtggtgacagttgggttggcattcttagacccagatgttctcagccagcatcagctttgatctccctgacgacctgcatactcttaagatgctggtttagaagattttttgcagagtggaaaataccagggaaagatgcacagaggagtgctgaaacctaaatgctgccttaggttggtcaattgtaccatcaaaggaattgaatttctcagagataagagttttgtgtacactgtaagatgaacttttccattcctgatcactagatggtgtgaaggagtccagaatatgccaccccaaaatatgccactttagcatgagtattattttgagctgaaggcaactgcgaatcaacagaagcagggaaagttctctgccctccccttatctgcctaaaaacagggtataaatttcctcttgtgaaagagtcatatattccccagtccccctggaccaggatgaaaagaatgacctttatcactgaagaaatataattgacactgagatgagtctgcataaacaaattttaaaattatccttaacttttgtattagtcagagggacagaacgctagagggacagaactaatggaatagattagattaatagaaaactccattaactacctgacctccataagcccctcctttaactggaggaccacagtgacatttaaggtccccttggatgaacgtcagttcacagccagtgtccagtagtcctcaaaaagtctgatcatttcccttttcccagtgaacagttaaccctggtaaaagactggaggtctccttggggaaggatgggagaaagagtcactgcataaatagttggtaatgtagtgctggtccttcctcaaaagaacccagactccccttcattcaaggggttctgggtctgtaaaccgtctcaagtctggaaattgattgaggggctgtgattctccatttttataattcaaattagactttcatccatttgacctagaagttatccgcttgtataaattaagtaggaatgcagtaggcttcctatcaatttcacttctaggaacaccatgattaattacccaatgccagagctctacatgagtcagactattctgattgctgctttgcctcggctgtccgttacggtagctacacccaccttgtctttggtggttgagtgctgccacttggcccctgccacctgaagatccaattattgccactgtatttaaattttgtagttgagtgactgtggttccccgttagatctgacatacagaaaagagcaattacagggctcttcaaagatgcaggtgctgccctcacaaatccattttgcaaggcatcggtcaagggtatatttttctggaccctcccagctgggatgagcaggtctaaagtgactaattcactccaccatcccaatctccctaagcctttggatcccttcctctacattaaaccaagagagatcaggcatttccaccttgctcacaggggtcgttttttaatccaaattttagctaaccaggcaaataaactattagaaccttttttaacttcccgagctgcagcattaaatgcagagtccttacttagtgggcccaaatcaataaattcagcctgatccaactctgtgttccttccaccattatcccacatccttaatatccattcccatgcctgttctccagatttgtttatataaattagaaaactcaaacagttatttttgagcatagtacaccccctcatgggtcacactctcaacctcacctctaggggcctgcttggactttagtctagttacaaatgtagaagcaaacaggggtgttaggggtggctcctgaggagaatcaacattattttgcctggcaactgcctcagaggaggccatcactgttgcctcaggcagtgcagggtttatctcctcagacaaagggggaaaggctgatggccatgatggcatgggttggggagtggatgttgccactaatggggatgaggaagttgttggttctggcaaaaaaggctcatcagagtttacaaactcagtgtccccagcttcatcagggtccccccacatgtctccattccgagttgcaggtttcctttctttcccaatcagtgccctcactttaacagtagacacctggagagactgtgtatgcacctttcattgcaggtcagacactcgcatgataaaagcttgtatctgtttctccacaatttcagctctttctctacaggagataagactcttactcagggcaatcttagcagatttgaggctcagtacctgcttctgaagttgggaactagaatccctgagttcatcattttatttcatcactttgtccagcgaacttcagagcaaccaaccagcttcattctgttctttggttctccacatatgatcaaatgcattatgtatagagtcactaaactccttgcctctcatgagtgataaatcaggagtgtcaaatgcatttattttgcataattctctaaacagttcacaccaaggactatcagtgttctccatactattagaagtagagtccttagcatgttttgatctaatcatattaagcagtcagctccagaaatcccaaaaccaacgaaagaactccatccttaatattattttcctctagaactactcctagtgccaaaatctgtattagtcagggttttagtcagggttctccagagggacaaaactaagggaatatatatatatttatggagcttattaaatattagctcacatgatcacgaggtcccacaataagccatctgcaggctgaggagcaaggagagccagtctgagttccaaaactgaagaacctggagtatgatgttcgagggcaggaagcatccagcacaggagaaagatgtaggctggaaggctaggccagcctctcttttcacatttttctgcctgttgtattctagccacgctggcagctgattaaatggtgctcatgcagattaagggtgggtctacctttcccagcccactgactcaaatgttaatctcctttggcaacaccctcactgacatacccaggatcaatgctttgtatccttcaatccaatcaagttgacaggcagtactaaccatcacaacttcattagttttccctaggaatttcctagttacttttccacaaattttcagtcctggaagcccaattcctctttcctttgtccaggtactttttcgcagtttattactctttgttaaaatggtatataagccccagagtctaaccacttctttgtgttgtcaactcctgtgcacacaaaaatattaacatcaataaaatgtatatgccattttccctgttaatctgtcttgtcagtttaatttctatgccccagttactaaacctaaaatggtagagggaaaagtggttttttcctcccctacacgtgacacagggctgtaaaatatgttcaagttaatttaatctgttttaaggtttaatgagactggttttattttagagcacaatgaactttggaactctttcctctcagttgcctagatgcaggtatgacacatctgagaaattatccaggaattagctttatcacaagaagaaaaagtcaaacacccgtgattgttgctttcccacaaaacaggggtgcatcttagaatttctgcacctctgacttggcagaagcctcagcttcatgaatagttgcaggaggtaagttgatgcaatgggatgctgggcaggtctcctaaacccaaatctcccgcctcctcatgttccctgtaatttccataatagaagacaacagttttcatttcacaattattgatagcaatcacaaaacaatacctgtgagaaatgttatactaacaatcccacattcagttttcaatggttaagagacatcttttccagcaaaagatgtggatgagactgaaaaggatatcacagatggaggagacaaacacttaaaatggggtttagccatgatggaaataaatttcacctacttctgagcttgacaggtcaacccttactaggcttcatccatcgacccaaagcagctactcagatgttactttccaagcattgttttttggttttttttttttttttttgtgaaaacaaaacaaaacaaaaaaacacctgagttcatcatttatttcatttttttggtaaaacaattcatttaattcttgccttcaaagagcttttcaactggaggaggatgtaaagaaaaatgcataattatgtagagtagaaacataaatacattctagcaatttacagtcctttagagcctaaagtttagaaatacatacacttcaacacatattccaaaaatacttctgcaaagaggcagccctctcctaccaacagctactaaaagagtccaccaaatgtctagatataaaaatacataatcatacaattaatgaaaacttattttgcattgtgtaaaatttcaagtatctatcaaggttggttctatcattggtgtgcttgaattggagggtgagcaaggctcctatgttgcacctgggaatgcacctcttaaatctgttaatatgttatccttctctttttaattttcttaaaatttgtttgttgaaaaacctagagcatattttctacattttgcttgttgctgactgtatccccatggtgattcttgatagatttatttttcccttgtgttttctacagccctagtagtgagatctagaggctggctaagatttagcttagaaggtttgagtgatagtatatcaggagatgtgctgtgtccttcccattgcatccaactggagacacgtaatatctggttctctctctttttgtgatattggcattgaccattgggagtaggtgatgccagcttcatccaaagcttcccttcagcattttgtctaacagttttagcagtcattgataatccttgcctagactcattgtttcattagtggttacaaagtggcggcattctagctccttctaatgcctcctttgtttataaattcttttgaaaaagaaaaaatttatctcctcaactattttggttatcccaaggtacagcgctttctggaaactggggataaatgcttgattctttacctttatttgccacttttcagaacaatgagttggttcctggcatcctacaaggggagtgcaaagcttttaaaatatcactataaatgcttggattttgacatatcctctatgtttcaatacattgcagatattattctttgtttgtttgtgttgaaataggatcttctgctgttgcccaggctggagtacagtgctgcaatcataactcactgcagcctcgacttcttgggctcaagtggttctcccacctcagcctcctgagtagctgggactgtaggcgtgcaccaccacacccagctaatttttcattttttattttttgtagagacagggtatcactatgttgtccaggctggtcttgaacacctggatattgttctttttagatccatctttgaatatagttttttcatctttggccagtaggaggctttacctgttgagtcctgtgtgttttgagtcttttcccattgcctaagctgtctttgaaggcttccttgctttctggtatgataagatgttaccacctcatcttgaacatttcttgccccaggctggaattaacctttttttttttttttttctctcaaggaccctggttcctttcaataaaaaaggcatttggatacgaaagcatggatgcttgggagctccttgttcttgggggggttaatcattggttctagaccttttcagtggacacatccagaaaacgtttttaaatagaaatacatcaggagtttataccaatatttacaattcaagttaagagctacagatttttaaatgtagtgtctttgattttctatttaattatcttaagtcaaaaaacttgatttcttatgacataaatataattattttgtgcttttcctggttaatgtaagaaaaaaattttaagaatccataccaacatattattaacaatataactactgaagcaatttaatattttgttgcagttcttttcgtcctgaggacatgtcccactgcagatatacaaccaaatagacaagagtgtaaatcacttcaaataattcctttctacatggttaatactccgactgatttatttcattttgtttttgaattaagggattgtttttgttttataattttgtcaaatatttgtatattttcaaatgaacaaaacaaagcaaattcaggaaaacctcgtttccaaatctgttgctttcactgtttcctccctcctctaatgattcgcttttattaatttgttgtttcctatcctactgtcattgaatgtgttaaatattaaatacacactcacttttcttaggcaaaaggtagcataatacacattctaatttttgtcttactttttgcacttaagaatatattctaaagattaccccttggcagtatataagttagtctttcatctcttttagtagctacatagtagttcattgtgtagatgtagcatagtttattcaatcagtcccctcctgatgaatatttgggctactgccagtctccttccactgccaccagtgccacaataaataggcttttgcatttttttttttcatatttggtagtctatctttgggatagattcctagaagtgggattgtttggttaaaagataaatagagctatcatgttgctgaaatccctgcctagtggctgtaccactttgcatttccaccaacaatacataagaatgtgtgttttcccaagagaatattttcaaatttcaaagtattcaattagaacacccaccaagaaagatctttattaggagaatcaaactaaagctattgatacttaaaatacacctaataacaacaatttttaaagcttttgacaggtgcttttcatgaatatagacctaagaatttgacttagaaataagagagacgttgtactgaaaagatagaagtagagagaggagacccagtggaagagtagaaaagtagagagtcattggcttaaagagttgaaaaatagatccttatctcagccctgctgtgagctaggtatgtaatctacacgaaattgcctgccactctgggtttcagttccctctgatgcataagcaggaggtgaggtttcttacctcaccctgctgtcagttgccttccagatctctcatctgtgtgcctgcatgcagaaggcgaaaggaatgctacaggaagccatcagaccagggtgggaaaaactgggggaagccccacttccacgttagaccaaaatcaaatcagaaccccagacactcccaagctgggtgttgtttgcaaaacattgttctcctgggacctgggaccaaggttgggcagagggtggagtcttcaacatttaccaagttcctgttttaggctgggcatgctgtagctgcctggcattcgtcaacttgcttttgtccctgtaatctgttttgcaaataaagacacatggtctcagagagattaagtggtttgtcccaaatcacacagctggcagcagagctggggttaaagtcttcttattgctttgtacctgtgagccctacactgctgcagaaatactacaaagaatcggttctctcctagacgacagaggccatgtactgaacacaattagttaaaccctgtgtaaaactggagccttctgggcatgatagagaacttccagctgtctttgaacaagacagctttgtcccaagaaagctgtcaaatgactcactgcctgataaggaattagaaaaccataaaataatcctgtcaatctattcactaaaagctagaagttcatttgttaccaaattcctggccaagcaaaaaggtgtcaaaagggaaattaacacttaattgatccataactatgcagaaagcattatgttgggtaatttacagatgctacttaatttaattttcataatattccaataaaataagagtcatctttccattttacagacgaagcaactgaagttcagagagataaactaaatgctgtaagttctcgcatttagtagtggtgggactataattttaccatgtttctttgtgatttcaaagcccactctcaattccccaagttgtattaagccaatgtgacaggaccgaaggagcccggcagtggacacagagcaggatttgttcttctctggttttctcggtaaccagctatgtgcacatcacataaagacttcggagttcagttaatttttgtcaacatctcttgttcccttcaggtcacagcccacattcttagcatggccactctgccctatggccaccgtggcctatatgacctcatccctgcctacccaatagaagtcactcccacctaccacactccagctcccctggacccactgagctccttcagagcatcacaccatcccaccttggaggctttggttacactgctccttctgcctagcactcagtcctccttctccctctcccgctccatcccttgggtaattcttacctatccttcaaggatgagtttagccatgttttcctcaaagaagtttctgatcattcaatcacataagatcactctgctatttgcctccctagtatcatagcctcctttcccttttttaaatagcatttgttacttttaacatggtttcttcatcgtattttctatttcaaagttcatcttccttgtaagctctatgatggtgacaaacacactatctgtctcattcactgatatttccccagagtcacacacagcacctggctccataaacacatgctcccgactccgtccctcctgcttgccccttcctgtagcctggacaggagacttgggattcttccaggagagatgctctagagtggacagacttcatctatcattggcattttttaaaagacttgattagaaaccaaagtaacaagtatgattaaatgatggaaatgctagatgttaaaaaccaaggttagaactccaggttgtgtcttgtgacctcagctgcccatgagtttggcaaactgcaaaaccacgcataggaagggttattgcctcaactgttgttttggatcagtttagtcagacatgcatatggcagaattctttttttttttttttttttgagatggagtctcgctttgttgcccaggctggagtgcagtagtgtgatctcagctcactgcaacctctacctccaggtttcatgcgattctgctacctaagctcccaagcagctgagactgtaggtgcatgccaccatgtccagctaatttttgtatttttagtagagatggggtttcaccatgttggccagggtggtctcaaactcccgacctcaagtgatccatccacctgggcctaccaaagtactgggattacaggtgtaagccactgcgcccagcccagaaatttaacatcaggtgtatgtcatcaattataaagccctgagtatggagaattcatcttttgcagaaggttctcctgtggccaatttactagaaaaatacaaagaaaccacaccaggaaccaggaggtaacactatcagcaacatctttgcattaagacaatatctccatctaaacacactcatttttatttttacttaactataatttgcttgataaaaatgcaaaataatcttccgtggtaaattataaatactttcactcaatattacaattaacctatattcctgaaccccaaaccatggcacactgtctaagtgccttgtacacactattttgataaattcccacagtgactttaaggatggtactggtgttttccttgtagacagccaggaaagggaggaaaagagagatcgaatactggtcccacacagtatgggcggaatccaaacccaggtgggaagcttctgagcccgctaggaatccttcctgtttgtaagcttgctttgtatcaaatgatcaagcacagacacacttatcctaaaatggggagcacatgccctgctttctgactgaacttgaattctcagaaacattatttatgggggaaaagtcttacaagtaaagaagtcagctagcttctcagtccaaaatctacctagagaaatcttttattattgtccaattaagtttggcaaattgcaaaaccactcataggaagggttactgcctaaattgttgttttggatcaatgtaatcatacatgcatatggtcgaaatttaacatcaggtgtgtgtcatcaattataaggccctgagtatagagaattcattgcattttttattatgacaacatttaccaagttgaccatgtttaagcatttaccaagtcaatcatttagcattctatagttcaaaggtgatgggtattacatttaaaggaaagatgacatagtcaacaatgccactagcataaagcatctaatttctaggctctccacttcagctctcctctgttaaggctggaagtaactgccatgatctcaccactaggagggaaaaagagaaatctacccatctatgatagtgaagagaaagctcaaagcaagtggacctatggcgctgtgctcagacttgagcagacatcagaatcccatggagggcttgtaaagatccagattgcaggcccacccctagaagtggatctgaggtgggggggcccatgattttgcatttctagcaagttctcaggtgatgctgacactgctggtgcagggaccacacttgagaaccacccacccatgacactggtgcacaatgtttcaaactcatgccaacagcagacaggatgcatctacccacatctatacctggcacacctgcaccacacaggaacaccacatatctgcacaaggtatcacaggcatacccgtcacacacatgcacacacttttttgcatgtgtatgccagaaacacactatacatctgcaccactcataggtaatacaaactggcatcacgcacacaaacaccacatgcctacattacacactgtcgtgcacacacagctgtaccacacgtctataactcacatcatacacattcacctcgtatgcagacaggcactcacatatacactgcacataaacagtgcatacctataccacacactcctcacacctgctccacacactcacatgcatgcataccctcaacctacacatcatatgtgctgttcatctgcaccacacgtgccccacagctacacacactcacccaactgcagattccgagctacctgctgctatcaccttgctcttgagacattccctcaatccttctcctcctttccccctgccctttggcctcatcctatttttcctcatgggtggcccaaatacatttcccaaagtgtccatccaagaaggctcccgcactgtaggcatctctgtattttcttcccacccacatttgacttagctactctttgtgaaccaagttctttatgttcaatgtcagtccaaatacttttgtttcaacttaaataaatgcagcaaatagttacagatctttttctgtgcaaagccttaaactaagcatgttgaggaggaaaagtgatgaatgagacgacgctgacattcattcattcattcattcaatgtattagctaggtactggtgagccatggccagcatagggaggaggtacttgataagtttcttcccagaactctttagattccagggagtgggcagcagggtcctcttccctcttctgaggtgacttctggcccctactacaactccagatggttctctgagtatggaagaaccatccacgccagcagacaaaaattaacattcttataatattaacaataacactagcagcaaaaaaaaaaaaaaaaaaagccaccttttagtgaggatagtatggatatgtagggcatatctacatactaaaatatgtagcactatgcactacacatcttaactggtaattattcctccagatattatcaatccattttccaggtcagaaaatagaactgtgggatgaatcttgcaggtggagaatagaagtttcaatccaggtaactgacatgagccagcggctgcttcctttccatttcagcacatgcagccccttctccaaattcagacagagctcccttgattgtgcagtctgaggcagcatcaatgcaactcacagaaatggtggacatctctgtctcacctgctccgcgtctgttatcagggagagcagtgtcataaagtcaaaggcattaaaggtaaaagcaggcattcaagacaagaagatgaaaccacagtgggactttatttctttttataatttgaaacaaagccttaacttagagtaaacaggctttggcaaagaggtgacttccaccatgcaaaccatgaattccattcttctgttaggatggtctccctgttctaatggagccacatacctttgtgtggctggttacacagtgggtatccaggtagtaaggactgatttaatttctccatgattcaggcttgtccagacatttgtcctcaagctgtatttgagggcagcaaggataaagagtctcttggccagaagacgctccctcattcacctcccacttgccctgtctgctgacctccaaggaaattcagtcctgcagttaacatctgtggtcccatcagctgagttgaagtaaaaggtacttaacgcacgcagctcgttttgcaaggttagaaggaatcaataggagatgtgtttaatgtggtatcactatcagggctcatcacacttttaaaactgaaatatccacagtgctgtataatcttagtctcgctgtaaagagaatgggtttagtgtgctttaagatagatttcatgcctattacagatgcacacacaaaaaaaatgggtgagtgtcctcaaatttcactattacatatcttcttacatatctttttcttttctttcttccctttctccttttcttcctttcaagcattctcttctctctcttttcccatctctctcttctctctctctcttttcccttgcttccttccctcctttctcctctctttctttttctatctttcattcttcccttgaattttaggtgtctaattccctcccatggaaatttgccagaatttcagcaaaccaccaaaaagagctagctaggtgatttctctttgagttccccggagcacacaggtcttctgtaagattgaggcttggaaactctctcatcaaggagaggagctgattggaacccacagccttataacaaacctgacttttccataagtttttgtgaaattattccgaaagagaagcctgtctgaacagagcataattaaagatagcacattgttcttttgctgagtagattgcaaggtaaaaaatccttgttgatattcacacatcatacataaacactagtggaaaattagaaatagtaaggtcaagagtgtattatgtgtttgtggggcaatggaggttctcttcaatttcataatgacctatgtagggaaatcatggtccataacaaagggaagtgtcagaagagatgaaagaaagcaaaccttggttaaacagtccctatcagcactagcacaaggcaaagatatggatattcagctctatgagcatttgtctatggcattcttagcacgtagttctgatttaagaataactcagcagtacagtctaatgctattccctcagatgactgtttagagaagtgactgaactgcttgacttggaaacttactgataactaccactggtacaattttcagccaaaatgactaaactgggaattaacttatattggtttgctagagctgtcataacaagtaccacaaactggatgacttcaacaacagaaatatatatcatttctctcacagttctggaactcagaaggccaagatcaaggttggtaaggttggttcctcccgacggatgtgaggaagaatctgttccaggcctccctcctagcttctggaagcttcaggagctcttcagtttgttacattctccccatgtctttacatcaccttctatttgtgtgagtctgtctctgtgtccgaatttcctcttttttactagtttctcttgttttgtgagacaaactctcactctgttgcccaggctggagtgcagtggtgcgatctctgctcactgcaacatctgcctcctgggttcaagcacttatcgtgcctcagcctcctgagcagctgggattacaggtgtgtgccaccatgcccagctaattttggtatttttagtagagatggggttttgccatgttggccacgctggtcttgaactcttggcctcaaagtggtccacccacttcggtctcccaaagtgctgggattacaggcatgagccactacacctggctcaaacttgctgttttctttataaggacaccagtctcattggattaggactcaccctaatgatgtcatctaatttgatcatctacaaggaccctatttccaaataaggtcacattcataggtgctgggggttagggcttcaaatatatatatatatatatatatatatatattttttttttttttttcgagatggagtttcactcccgttgagctaattttggtatttttagtagagacagggtttctccatgttggtcaggctggtctcgaactctggacctcagatgatcctcctgccttggcctcccaaagtgctgggattacaggcgtgagccatcgcgcctggccaggacttcagatctttagggggacacaatccaatgcataacaacaggcattcgttttcacatccacatgttcatcacttaattattatccttactgagttgtaaatgcatactgtatgtcactttatatattcacaccaaattctctttcatatgccctaaatgcctctgaatagaggggcttacatgccaaaaaggaaatgaaatttcacttattttccctatttgactatccagagaatgagcctttcccatggcacaggacaaagatgcaacccatgccataaagggttgaggtcccagccaatccaaacagaagtgtccattgtggaatgagggtacccattgtcatagccactgtccttcctccaggaattcaccaaaagtgaggatgaggcctaactaagctagacgtggttatatgaaagcagtactctgtctttcaggtaagcgataaaaactagttcatgacatgggtaagctacacatcaaattgagtcttttggcaatattacataaaatctgacacgacttatgaggttgtccatcctgtctcattaatatctaaattactaaatttcttttgctgattttcctccacatgtttataacattaaatatgcaaaaaagtacttttttactaatgcccttataccaagttcttcataatttatttttttcttttttgtgagacagtgtctcactctgtcatacagactctgtgatccatccatccactgcagtgctgcgatctcagctcactgcaacctccacctctggggttcaagcgattctcccacctcagcctccagagtagctgagactacaggcacttgccatcatgcccgtccaacttgatggggtttcatcatgttggccaggctggtcttgaactcctgacctcaagtgatcctcccacctcagcttcccaaagtgctgggattacaggtgtgagccactgggcctggccagtctccatggtttaaatatcgtttcagtatcagtgtcaaaaatttggtgaacatataagtatcaaataagtctacaaatcctgtgattatggccccaggaaggaagtaacaggtgatttcccttcagagaatcagcattttgccactccaggccaccacttgaggagtagtatacctaaaatatcatagctaaaggttagggcttccttaacttgattaacccaatttagggccctacttgaagccacagcagattgtactcaatcttactattttattttaaaatgaagagtgtatgtacaaggttcccagtttaataatttaataagcccactaaaaagtgtctcagatctgagaaacaagcactttttacatgaaaaaattcaaaactaaagaacaatcacttttaaagcacaaaggaaggacaactgaaaaaaggaactgtgtgtttgtaaaagtaagaatatcttccatcacttggatttatagtatatttcatttttcctgaataaaccacatagacattaatgtaccatttaagtttatttgcaaatcaagaacttaatggccccttaaaactgaaggtaattctgatatctataatattcattcttttttacctttggtggacactgcaatgaagcaaatgcacgtgattattctcagtctcctgatggagatggataaaaagtactagatccctatgaatgttttttcacatgattctctatatgtagtatggccactgtcaaaactttgggaaaattctgaattttgttatgctcatataatctacataaagacaaagaccagttatgtgcctaaccaagagcacctcatggcctgataccagcagagtgaagaattgcagctagaccattcatcctcctgactccagcctcaccccacttccactcaccctctgtgtcctttagttctgagccactgaaccctataattcagcaccttcctctttcaggaggtcatctcggctttcctggtctgcttgtgaacattctcacatttacccatttatttctatcctaggaacctcgttccccatgctctctatcccagatggctcacagtcttaataatgcaccaaaggtgagggcggaaaagctgagcaatggaacatattgacctaggtgccccgaggaaccagacactcatgtgactggatgaaaacgaaggctctggagcattggctttctcatctgtataatggataaactatttccaaaaccaagttgtgattgtgagagtccaaggatctagtgaacctggtcagagtaagtgcttagcaaatgttaactattttattattagtaataataactagttattattgttaatattttaccatctagataggtatcaatactttaccatctagattgttggtcaatattttaccatctagatagatgtgatctattgtttatcatcatatcatgaatatatttatattttaacagcaaatgagacactggggctcactgactttaccattctcatctaacagatggaagggaaaggtgatctctacagcagctaccagcagacccagggctaggactcagctgctccaattccctaattcctaacttgtccttggcactaggaagtttctctcttgagtcctgagaatcagagaattgatgttcaccttatcaaataagatcttttaagattataaactcagcaagagaggagactgtttcatagttagagtcccaatttcctcttcattctcttctgcatttgggggagtggaatgctttgagatatccctctaaagcttcaagatactctcctgggaatgcaagagcttgcccagggtcatttgatgtcaatgacacaccaataaaaatgatgctaaaaatagcattagttaacattttccagaatccatatcttccttattagacattaaaaatctctaaaaatgcaaaactattttttcttctggttgagtagaccctctcaactctattctttcactattatgagaaaagcacactgcttccctacactctcacacacaacttctgacaccgtatgtaagaatagtgtcacactatccacccggagatagtgctagatcccagagcttaagagctctgcctcacagaactgcccccacttcatacgccaatcacaagccccaggctgtggcctgtgcttttgacccaacagctataaactagtagttcccatgactcccatccttgggttttataatttggtaagacagctcatagaatgcagggaaatacttcactatgtttaccagtttattataaaggatagtacaaaggctgtacatgaacagccagatgaagaggtaccagtagcaagatactgggttgagaggggagagggtggagcacacagttttcatgacataaagctttttccatgaaaaaggtaataatatatgtgtattgatttcctagtactactgtaacaaattaccacaaacctagtggcttaaaacaacacaaatgtctcatataattcttaaggtcagaagtctaaacaggtgtattaggccattcttgcgttgttataaagaaatacctgaggctgggtaatttataaagaaaagagattgtattggctcagggttctacaggccgtgcaagcatggcactggtatatgcatctgcctggcttctggagagggcttcagggagcttttactcacggcagaaggcaaagcaggagcaggcaagacacgtggcaaaaacaggagtaagagagagcacagaggtgccatgcacttttaaacaagcagacctcatgtgaactcagagaaaatctcactcatcaccgaggggatggcgctaaaccattcatgaggaatctgcccccacgacccaatcacctcccaccaggccccatcaccagcatgggaatcacgttccaacatgagatttggaggtgacagacactcaaacgatatcattcagcgcgatggcccctaaaatatcatgtccttctcaccttgcaaaatacaatcatctctcccaacagttccccaaagacttaacccattctagccccaattcaaaagtcctaaagtccaaagtctcatctggagatgagtttcttccacccatgagcctgtgaaatcaaagacaagtttcttactttcaagatacaatgggggtacaggcattaggtaaacattcttgttccaaaaaaaagaaatcagccaaaagaaaggggctataggccagcagggcaatcattaaatcttaaagctccaaaataatcttctttgaccccatgtcccacattcagggcacactggtgcaagggacgggctcccaaggtcttgggcagctccacccctgtggctttggagggtgcagcccctgtggctgctctcacaggttgtcgagttcctgtagcctttccagacccccacatttccccttggcattgccctagtagaggttctctgtgatggctccacccctgcatcaggcttctccctgagcacccaggctttcacatatatcctctgaaatctaggtacaagttgtcaagcatcctttactcttgcgttctgagcacctacaggcttaacaccatgtggaagccactaaagcttatggcttgtgccctccagagccatggcccaagctacacctgggacgctttgagccaaggctgcagccagagaagtgaagatgcagggatcaatttcctgggtggcttaggccattcgcgtctcaggcttggcccacaaaaccattctttcctcctaggcctctggacctgtagtgggaggggctgccttgtagatccctaaaaagccttcagggcctttttccaaacatcttggccatcagcacttggctcctttttagtcatgcaaatctctctagtaagttgttgttctgtggcccacttggatgcttcctctaaacctaggcttttcttttctaccacatggccaggttgcaaatttttcaaatttttatgttctgcttcccctttaaatataagttccaatcttaagtcatttctttgcccctatatctgccagtccacctcttaaaggctttatggctaagaaattttttctgccagataccctaaatcatcactctcaagttcaaagttccacaaatccttaggacatgaacacaatgcaggcaagttctttgctaaagcagaacaagggtgacctttgctttagttcccagtaagttcctcatcttcatctaagatcatatcagcctggccttcactgctcatatctctatcagcattttggtcacaacaatatgaccagtctttaagaagtttcaaattttcctcatcgtcctgtcttcttctgagccctccacactcttccaacctctgcctgttacccagttccaaagttgcttcctcatctacagatatctttatagcaatgccccactccttggttccaattttctgtattaggctgttcttgtgttgttataaagaaatatctgagactgggtaatttataaagaaaagaagtttaattgactcaaagttctgcaggctgtgcaagcatggcaccaacatctgcatttgtctggcttctaatgaggcctcagggagctttcactcatggtggaaggtgaagtgggagccagtacatcacgggagagtgggaacaaaagagtgaggtgggaagtgccacacactttggtgataagtgagttcttgctcagagtttcacggaaactcactgaatttgcatgaaactctgagcaagaactcccttatcaccaaggagatggtaccaaacgtttcatgaagaatctgcccccagaaccaattaccttccaccaggtcacacctctaacattgggaatcacattttaaccgagatttggagggaacaaatatccaaaccatatcaatgggtctctaggttaaaagcaaggtgtccagagggccatgcgcctcctgaagtcttccatcttctatagactgctcactttccttggcttcaggctccttctactgtcttcaaagccagcaatggtgcctggagaccttcttgcactacagctctctgacctctcctgcctccctcttccacttttatggacccctgtgattacattggacctagcagaataatttcagatattctccttactttaaggtctgttgattaacaaccttaattccatctgtaaccttcattcttctctgccatgtgaggtaatatgggttctggggattagaatgtggacatctttggaggagccattattctgttttccataagatgtaaagtacctgtttagttctagtagttttctgtcatagagaatttattttttcaactgaaaacacagacagcctaattaaaacttaatttaatgctaatacagcaaatgggtttaccactttgtgttgaattgcttcaccaattctgggtttcttgagaaaatcttctctaacacccccatttcacctggggctctttgactcacatggcatttaacaaccaagacaaaattggaatctggtgtcctgtgaagtggtttctccttatcacattccaccatcatgaagccccttgaagttactgctccaaaaaatagtgactctcccctgattcaacagagtggactgacctacaaggcagtctgcactggctgatcaaaacacccatgtacattccagacaaaattcgtggaaagcataattttgttttaatgctaggacagaaaaaaatttcatcagcattcagagtatttgtttaaaattctgacatgtatacacaagcatttcatcctttgtataatcaaaggccttcatacaataaaactactgggttggtgcaaaagtaatcacagttttgcatcaacctgatacatctatcaagttttgaagggaaaagattttattcaagaatcttgtcagccgagcacagtggttcatgcctataatcccaacccttttggaggctgaggcaggtggattgcttgagcccaggggttcaagaccagcctgggcaacatggcaaaaccccgccagtacaaaaaaacacaaaaagtagacaggcctagtggcatacacatgtagtcccagttacttgggagtctgaggcaggagaatgcttaccccaggaagttgagggtgcagtgagccatgatcctgccactgtactccagcctaggtgacagagcaagacttgtctcaaaaacaaaacaaaaaatgcaaattctgtggcccaaaaaattgttgtctacatgtgaagggacctgaaagaggttttgagaaagcacataggcatccctgggcatatttgttcaggatctacttcaacttactaagaaaaaaatcctacaacataatatgataaaatttctataagcccactctaaaatcacaggtgacaccaatgaaaactgggaagtgggcctagatataatatggaaactaaagactactaatcttctcactttacatagatgcgaatcagtatttagtgcttttatttttatgtaggtagtttaatcaacattaatgtgtttaaaatattaatattattaaaagcattttgataacaaagtatattactagtagaatttaaaataaaattgctacagaaaagagcaaagaaaacagagtttatattttttaaaaacttactagggaaatagcaggaaaaaaattttttttaatgaaataagataaagaaaggaagcacaattacatcagtaataataacataaacatctaccctaaactgcaaagtaaaagacagccacatggtttgatttggttagttcaagtggtgagttaatcaaattcaacctagtattatttaaaagccctaacacttaaaataaattggcacataagtattattaagtgattaggcaaacatgtaacagctaaaggcaggaagaaataaaataaatataagaagagaaaatagaaattttcatattcttatcaggcaatggagaattaaaagaaaaagccatctcctgaaatgaagagagttatagtattttgataataaaatccaaaaggaaaacatgaaagtcataaatctttatgctccaaataatattgttcaaaatatagtaatcacaaatcattagaggaataaagataagttaacagtagtgggaccttcctccatctttcacagttgaagtatacaaatatatatacacctgggtggggcgtagagaaagaagttccaaataacaataagatttattaggtttacagaaagtttggtgtcttatgagagaaaaggatgatatatttcctatcaagcttacaaagaatattggcaaatactaattatatagtacactatatactcttataagcccaaaaaatagaaaaaaagacagtccaaaattatcacatcacaaattattctctacaaaaaaattgcaccacagtggctcaggcctgtaatcccagcactttgggaggctgaggtgggtggaccacctgaagtcaggagttcaagaccagcctgaccaacatggagaaactccatctctactaaaaatacaaaattagccgggcatggtagcacatgcctgtaatcccagctactcaggaggctgaggcaggagaattgctttaacccaggaggtggaggttacagtgagctgagatcatgccatggcactccagcctggggaacaacagcaaaactccgtctaaaaaaaaaacaaaaaaaaacaaaaaataattgcactaaaaatcaagcacaccattaaggattattttgacactaatgaaagtgaaaacataatttataaaaacgtctggaatgctgatacagttatataccaaagcaaatttatagcttgtaagccttttatcaggacgtcagaaagaatgaaaattactaaaataagtgttcaatttttaaaaatggaaaaacaagaacaaatacaatttaaggaaaacaaaaaggggaaaataacagcagaaattaatgaattagaaaataaattagataaaataaacaaatctaagagtggattctttgtagaaaaaaaatttctgatcaaacatttagcaggcctaatcaaatagaaaagagaaaaaacatacatacataaaactgggaataacaatgaatatgaccacagacataagtaaaaattgtgtaatatcgtattctgacaaattaaaattttaaattaagcagatgattggtaaagaaaacataaaagatgccaaaaagcttaatgaataaataactagggaagaaaatttcacaattttctaaaatttctcgtagagaaagatggaagaattttccatttttttatgccaatctctacatggatatttgaaaaagtgaaaaactccagaaatataaatctatggaccaatcttcctcataattatgaatgaaaaaattctaaatcaaatattgacaatttaatttggaaatgagtctaaaaatattatatcatgttcaagaataatttcctctaagaatgaaaaaattatttactatggaaatttcaaaagaattcactgcattaggtcaaaagagaagatgctcaagggtattaatttattagagaccaaaatgtatttgacatgtatatagcatctgatactgattttctcagtcttttaataaagatagacatctatatgtcttaagatgataaagaccactattgttcactattagccagtggtctttaatgctaaaacaccagagatatccatattaatatctgaaaaatacatgataccttctataatcactatttttaaaaattgttctaaatgttctggcattgcaaaaatacgctttagtggcgagtcacagtccataaatatggtggaaaaagaggcaagttattagaaaaagaaaattacaaaacttaactgagggatgaaaaagaaccgcatgaaagaagtgacaaattatattttagaaaagaaatataaatattaaaattcttcccccaaataattaataggcataattaattttgtttaaatccagtaagatttttggaaacatggtaattaaacgctaaagtacatctgggagaatggaatacttaataattgaccattcagttagaaaagcaagagacagagcagttgatttcagaaaatatatgaaatttatgaatatgtagtataattatatgtagaagcatatatattataaatattagttaaaatgacaaaaatgaaaacaaatttgaaggtgcaatacaatactctaaacctagaatactaggtatagaaattatggaataactatatagagatttcaaggcagatgttaaacatcatgcagaaaaatattataccagtaagtccatgttcacatatttaaaatgatcccaatcctacaaatatatatgcacataaactatatatgtaatacataaaatatatttgtgctgtccccaaaacattttttacttataaaaaaaatgctgcagtgtgataccagccataacaatccacatcaacgatgtggcattgctatgttgattctctctaaatgacatgtttttggatgactattattttctttttgtgcttttctgtatttttcatattttctgaaaggaatgtgttataatatcagaaaagatattttgtatgaataacaccgtactagtattgtgcataatgttttgcataattctaattttttaatcaaagaaatctttgaaaatcttataaaattgttagcactttctccagaaaaaagaaacgcattatatacaagtaagcatcaaattttatataactttacagattttatagacccactgaagcccattcaagcgttccaggtgagaaacagactgtggaaaagttcaaagaaattccttaggcattatctcaatggagtctcatcaaaactttgtagacaggaatagctactacttttgccaatttaagaatgaataaacgatgcctcagagaggtaaagaacacacagttgacagggacagaattcacaccagtggccacgtcctgttgccttaccactgtgagtttcatgtcgtagcacagggtggtttattatacacggaacaggatattgtcaaataacaaaaccagaccttgaatcctgatttgcccgtgaaattttgaaaaacctcctgactttaccatgccttggtttcatcatcaataaagtagcgataataacacttgccctgcatatcccccagagttgttatggagataaaatgtagggggaagcacttgcaaacataatttatctttattattattaaaacataaacgtgtctattacgcatctattacaactcaggccagcactggggtaagtgctgatgggacctaggtggaggaagaaaaagacaaagcaccttactaaaaggcaattaaaatgcaccattctagttcaaaaagtctgtttccatgagtaattagcaatctattatgcatctgacaatggtttgttggctattacatcagttccatgtgcccatcctgtaaagtgaatcaacacagcagggagttcccagctttaaaaaatgtttgctttcacaggtatctgtctaatttatctctgtgatttaattttaatgattaaaattttaagttaattttgaagtctgctctttttccaccgcattcaccacagacttgctgaagactccaggacaattaaggcacataaaagcataacaaagctccctctccctatttgaccctatcaggcttcatattcttactgtcagaggtaattcacatgccttgataccccggatattttgtttgcataagtaggctaggtctttcataaatgtgagtggagttgcagtgtgtgaataagatgctgagctagtggtctctgaggtgagaacacttcatgcaactcagttttcttgtcagtaatctgggtatcatgaagccagttttaatgggaaaagtctctgtaaattacaatggcccatgaaagtggaataaaacatgattttttgcatttagaacatccctgagccagttccttccaatatcttcttcatcacaaatagtctatgacatcacctaatgtacttaatagtctgcctctaaaactgaactgagactcacgaccgatgttcttgttttgggtttttgctgcggattgcgctcacccatttagataccccttgttcactattcaccaggggatgggccatctggatccattatctgttttatttcttatgtaccccacagaagagtagttaaagcgaaaaactttatgtgctgatccattcatccttagtcacaacccttctactgttgctccggagtgacggttatagagcccgtaagtgtgagatcactccaggctgctcttctaacctctaaatggaatcagtcctcagggatggatggaatttcactgcatttgcccatttcatttgtataatgaaatcattgtttggcctttcattctgtactcttgccctttttggtcttaaggtggaccattcagtagccccttcctatttctctacgaaaactaagaatcataaatggactctcatcaaatctcaacaatttcatgtatttgtaaaaatatcacatcaaatacattccaccttcacagcagtatctatttgttatatacttgcatgtatttatatacaaatagaagtgaatacgtatataaatctataatgtgcggacgtggtaaaactcaaaccgtcaccagaaaaatcaatcgcttatcatcactgattgggtcagtcgtgtgacgatatgatccatgtgtgatcgggttcaactccaaagagcagcatgcaatgaaacattagccttccctggaatcacctggtgtacttgttaaaatagagacaatcatacctcgccccagaattacaggtggtttatggaacagagataaagtttttaaaaaatgtatttgttgatttatagccaaaatctccccaatgttacatggagggcaacaaaagggagagttgttgagtaaattacacaatattcatttaatgggaaccccacagtgattagcaagaagcttattaaacagaaaaatgcatgtggtattatgataaataaaaagccaacataataattgatggatcagagaaaaaggtcagcagtaaatcaacatacttgggaagctttagttttgagcaaagatgatcattcaaatcagtagggaaataatgtattatctaagaaatagtggtgaggcatctaagtagctacctaaaaaattgtatccccctttacacttacaccagcacaaattccagaatgaatgaaagtaaagccataaaagcaataaaggagagcatagaaaatattacaatctcaaaataagagagttttccaacactaatataaaacccaaaagacaataaaaaatactgatcgatccaacagtgtcaaggcctgtttttatatgctctttctccccaaataaacaccataaacaaaaggacaaagaacatactggagaaaatatttacaactcttaatgtacagggctaattaatacatgagtcattaaaggtcaatatttttaaaattccattaaaaatgggtaaatgacaaaaaaaatatagaaaataaaatatgatagcttttcatcatatacaaagtttctcaaccttacttattctcagaaatagacaacaaaacttcaggaagatactatatttcacttttcaggttaagaaagatcaaaagcttgatgacacactatgttgtggagaaatgagcactgccattcattgctggtgggcgtgtaaactggtaaatctctagtcaattaaaatataaaacgcacacaccatttgacccagcacttccatttcccatgaatttctcatgcagttgagaatttaaattttaaaggaaaatgataactctttcttggtcatagtcctaaggtatcaacaagtcacttgttgttataaacaagtcacttgtttgatgttataaagacatcaaaattggccgggcacagtggctcatgcctgtaatcccagcactttgggtggctgaggcaggcagatcatgaggtcaagagatggagaccatcctggccaacatggtgaaagcccgtctctactaaacatacaaaattagctgggcgtggtggtgcacgcctgtagtcccagctactcgggatgctgaggcaggaggaccacttgaaccaggaaggcagaggttgcagtgagccgagatcgtgccattgcactccagcctggtgacggaacaagactccgtctcacaaaaaaaaaaaaaaaaaaaaaaagacatcaaaattgatccgtgacaatccactttcgtaacatacttctgcaggctagccaaacaatcccagccatacttctgaaatccagctattagcaacaggcacactccaaatgccaagctttcacggctaaaggtcaactaatttctaaacacacttctcgcagtgttttaattcctgaacttaatacttcccaaaccctatatatgatcaacatttgctttgttttgacagaaccgtgtcctacaagcactgttgtctcttgtttagcaaacaataaagtcaggtttttgctttagatattgagtggtagccttttccttccatccaagaactagaacataggagagacagcatatgcataaagatgttctactctttttcaaagcattgtttaacatagcaacaggttgcaaacaatgtaaataatctcgaaggaccagtaaattagaaaaacagaaacaccacatgtgtcctggaaagggaactagctggcatggggcaaaggagggaaggagagaccaatacatttcatacacacaattttggagttcataacattttgccccataggcagatattacatattaaaaagtaagttatttaaagtcagaattttaaattgtatgtgtaaaaggaaaaaatacatatgaagttggtaacaaaccagtaactgttggtatgctaaattattggtggaatagttttttcaatgtctgtttccctaaacatttcataatgttgtgacataacttataattttaaatggaaatgatttataaatttcatgcacaatatcaaaccaaaatgcagcaaatgagattattccattgcaagttggcatataaccacaatattgaaggggcataaagctaatttctcttattaggagaaataaccaaggagaaaagaggaattagagaagtccaattacattgcatgagagaaactgacagaacaaaatcttcctgtaatattaaaaggcttcaaacaaagcccgaaacctctgtgagacttgaagctaacacttccattcccaacagcttggagagcaacactcctgttgcactggaactcaggtgcaactacagacacatgcattacttgtctatttttgcaagtaaatagttgcaaaatacacaagtaatgcatacgtattgcaaactttgcaattacttgtctattttttaaagtacacctagtaaagagtagatgcatattttgctttattttaaattagttctttctccctgatatacaagtccaggaaagatcccagcagcctctacttccagaagacagctacatgtacagcacaataccaatcagaaatgacatctcccaatatcatatttgctgagtcactcaagtactcaaaaagaaagaaaaaatagaccttagttttcttaccactttgccgtgtgctcttggaattcagaagccaggttaagctttcttctttcacctggagacctctaaaagggaagaaatagtaaaacaactgaaatcatgttgcttaaaagctatcctgagctgttgaggggggaataaaatagtacattaaaatgatccaaaatatcaaacagaactattttcatccatcattggatagtgacacattactcagactgtgccgacttgcagggtgaggttaagttgcagggtttcagccacccatcaatcctaaggtaactcacaaggcatatttgtattattccatcacttaagacaactttaatccagtcccccattccattttcatttctagtcttgaaatacttaatacagggtaaattgattatagaaaaaagtaacactcttggcatagaatttaatttttgcagtttattcattttaattggtgtctacactcaaaacctttgacaaacaagaaatttgaaagatctgataattaaacagttaatccaaacttcctcctgtaggaaaaattgtaatttttaggactaaaaccaaaaggcaaactttgaatatatttgtatttcttttcatgtttgagaaatcacttaaataatcactcgtatcagtcttatacataaaatttatagttttaaaagtttctttcaaaggctatcattaggtgatctggcactgtctaataaaattaaaaatacataaggccaggcaccatggctcatgcctgtaatcccagccctttggaaggccaaggtgggggcattgcttgagcctaggagttcaagacaagcctaggcaacatagagagagacctagactctacaaaaaaatttaaaaattaaccaggcatgggtgtgcaagcctgtagttccaactacttgtgaggctgaggcaggaagattcagttcacaaagttgaggctgaagtgagtggtgattatgccactgcactccagcctgagtgacagagcaaaaccctgtcccgaaaaataaaataaaatgaaattcttatgctacaattccatttctggggatctgtaaaggcacatgtaccatgatactcattacagcattgctatttggaggtcaagaactagacatcatgttaatgcccatagatgaaagaatggtgggataaacccatggagcaatgttatatccactggacagactatgaagcattcatgaaaagtaattaaatagcattaattatatgttaaagaaccttgtcaacgattttgattcagacaagcagcaggtagaaaagcagtaggtagaaagagaacaaaatggttactatatatatacatacatacatatatatatacacacacacacacacacacacacacacatataaacaaattgtaaaactaagccttcatatcagttattcccaatcaagagtgatattacctgctagggacatttcgtgatgtctggagacatcaaagctgtggggagcatgctcttagcatctggtgggtggaggccagggatgctgctgaacatgcctcagtgcacaggacagccaccacaaagacttatctggcccatgtgtcaatagcactgaggctgagacattcctgtatgtggatgtgatatgattttataattaaattacataagtatagaaaatgtgtggaagctcacacaccaggttgtccacgtagctcatctagcaagagatggaggcggggatgaaggctgagatgctagtggagaggaagtagtagtagacggaggtgcccagggtagggtcagctttataatacaatcttatctcttatatcttgttatgcttcggctctgtgtccccacccaactctcatcttgtagctctcataattctcacgcactgtgggagggacccagtgggagatgattgaatcatgggggtgggtctttcccatgctgttcttgtgatagtgaatgcgtttcatgaaatctgatggttttaaaaagggaagtttccctgcacaagccctctctttgcctgccgtcatccacgtaagatgcgacttgctcctccttgcctcccgccatcattgtgaggcctccccataaatgaaactgtaagtccaattaaacctctttcttttgtaaattgcccagtctcgggtatgtctttatcagcagtgtgaaaacagactaatacatacctgtatcaaattaccttgaaattattactgtcatgtttctttttgttccttagatgcagcaaagtaaaggcataactttaaaatttcactaaaccacactcttcccagataaaagaaaaataaacccaacttggaaggaaaccccaacttaaaggccatcaaagggagagaaatgataacagccagcctggcctttggccaatctttgtacaatattgcttcgattctcctaaataatcttgttgatttcaattaatttgaactggcctcaccctcttccactgttcatataagtagtgtggtatttttattacacaatagggaatttaattttaaatagagcagagcaccaaaaatatgaaaagtcactcattaactttgcatagatgtgagtatggctggtgtggttgttccacttttcctgctagcaaatccacaagatacacttcaaaatgagtattctcccttatgtcagacgtgaaccacacctagtcaatgccatttctgaattaagaagtagtactttttgtcatctttcctaaactgttagtcttcaggtgttttgtgtagatcttagcaaagtcacagagcttcattgtattctgagtaaacccctctttgatgtaagcccttgtgaggcttgtatatggctatatggcattactgtcagacatcagcaccaccaagaaaaagtacctattctcactaaatgccacatgtcaggttcctgcatacacataaaatgccaggaatgcagagggtgatatgggaggccaaaccgatcctcactgttcatcagaggaaaagaacattttttttgtactcctatttctaactcttcccaggcccttgccccttgattccattcaccctgctctcactggggtgataaattctccttctctcattttttgctcccattggttcttttctcactccttccccataattttattttactgtggaacatttccttactggcctgtaatgttttgtgattctcagcataaagtatttttccacctgaagtctccttacccaaatatctatcctcaagctattgtctgattgcacttccaatctcatgaagatactgtcactagtccggcctacatatccatactcatttgtgtgcactaagtgcttgttttctgattacccctctgatgagatgacaccacaaccctttgatgcctactctgttctgattctcaaggtctattttaactttctttgttatgtcacaaaacacagattataagactatcagagtacagctgggagcactggcccacagtagccaataggtttcaattcccctgctaatgccattcattggaaagtgtgtttttgcagtgtccagaggaatgccccgtggcggaggccaccatgatgcatcggcagtgttggcatcggtagaagtgggtagtggcagtggacatggccagcatctgtttattgtcccaaaaccagtcataagggaccttttgatgacagggaaaatctagggtatatgtgcctgttctatgtacctgaagtgcatttaagagtgtggatatatacatagacatgcacacaaactacctgtgtgtgtctccaatgtggaaaagaccaaaggtgtttgtaagctgtagacaagataccagcagagatttcttcttgtttcttccatattttccagtaaagtccaaattccttcctgacataaacttcctccctagccttctgttgggcaactctttgaagagccacccagaacatgcttcttgccagctctcatgactggttccttcactgtacgcaagtgtctgctcaaaggtcactgtgatggttaatattagtgtcaacttgattggatttgaaggatgcctagatggctagtattgtttttggatgtgtctgtgtgagtgttgccagaggagaccgacatttgagtaggtggaatgggagaggaagacccaccctcaatgtgggttggcaccacccaattggctgccaacatggctagaacaaagcagacagaagggatttgccttgtctcagatgagattttggactttagacttttgagttaatgctggaatgagttaagactttgagggactgttaggaaggcatgattgtattttgtaatgagagggacatgagatttgaaggggccagggccagaatgatacagtttgaatctgtgtccccactaaatctcacgtggaattgtaatcctcaatgttggaggaagggcctggtggaaggtggttggaatatggaggcggagtttccatgaatggtttatcaccatccccttggtgctattcttgtgatagtgagtgaatgagttatcacaagacctggttgttatacaagtgtgtggcacctccctactgtctctcttcctcctgttccaaccatgtaagacacctgcttccccattaccttctgccatgattgtaagtatcctgaggccccccccacagaagcagaagccactttgcttcctgtacagtctgcagaaccatgagtcaattaaacctcttgatatggtttggctgtgtccccacccaaatctcatcttgaattatatctcccataattcccacatgttgtgggagggacccagtgagagatcattgaatcatggcggtggttcccctatactgttctcattgcagtgaataagtctcatgagatcggattgtttgataaggggaaactcctttcgcttggctctcactcttctcttgtctgccaccatatgagatgtgcctttcaccttccatcatgattgtgaggcctctccagccacggggaactgtcagtccattaaacctctttttttgtaaattgcccagtcttgggtatgtctttatcagtggcatgaaaacagactgatacacttcttttcttacaaattacccagtcgcagttatttccttatagcagtgtgagaatggactaatacagtcacctcctcagagaagccatgtttgactattgtatgaacagtgcctggccctgcctcctggctgttcagccccggcctcactctattccataagccagcatcattttcttcacagcatgtgttcgcttctgatgtaacactatcgatgtttgctaggttatgtgagtcttaaccctgtattcatcccctgcccacactcactgtattgtgatcaccaccatgggaagggctgggctgtcctctggaccaggcatctaccacagggcaaggcatgaggtggacactggacagaggttcatgcaatttcttagttgatctgttttctgtacagatgaggaagaaaggctcagagaggtgatacgacccagccaaggtcactcagcaaatactaatgactgaacatttcatttgagcccagaatcctttgccctcaagcattggctcagatttaatttactttgttttgttttgtctttcagaaaaaactataaataactgatgcagactgttttttccccaagggaagcccagaaaagtgactgtatattctatgaagaacataagtatgtttcagtcatgagccagacattttcaagtaattctcaggaattctcaaggaattctgagtcctgaccttcctcttcccatggtgaactcagagccacaaagtctgctgcacacggagcttctatagatgcaaatctgagaaccctgttggctcaaagatatcactgccgcttataataagttgctttgcctcagcttccaaaacctcactgaaaaagcaggctccaattctaatacctcttatcctgagtccctgagacaagtcacttccttcccccaaggcccccatcatctccttctccttcttcctcctcctcctcctcctcctcctctttttcttcttcctattctctcatttggctcttcatttgtgttttgattgttccttgtgcctagttcttttataacatccatggcacttctcactgttaggtatttggttatatacacagcgagtatcctagattttggaaccaagcatgtgccaagtgccttatatgttacaaagttaatttatttaatcatcccaataaatttatgcagccaatatttgtatcccagttataaagattaaggcaactgggtctcagaaagatgaattcacttgccccctaatagagctcagagacagcctgtcccaaagtccagttcatctttttacatcattgtaagtcactataatccctttgggacttacatgaaatgcagaatggggagagagtgtagagagaatgggagataggcaggcagtatagaggaggtaagagcttgggctttggagtagacttcgtgtttgaatctttatgaactatggacaagtgatgtaaccattccaagcttcacaattctcttaaaagctttgcaaatctgtctttcaaaaagtaaagagagaataatattttcctgataaaaccgatatatggccggacatggtggctcacgcctgtaatcccagcactctgggaggccgaggcaggtggatcacgaggtcaggagatcgagactatcctggctaacacagtgaaaccccgtctctactaaaaaatacaaaaaattagccagacgtagtggcggacacctgtagtcccagctattcgggaggctgaggcgggagaatggcctgaacccgggaggcagagcttgcagtgagccaagatcacgccaccacactccagcctgggcaacagagcgagactccatcaaaaaaaaaaaaaaaaaaaaaaaaaaaagctgatataagattaaataatatataaaatgtatatttgcccccgagtctaaaggataagtgatgtgtaaatatattatctaggaaacaccagaggggcaccagtgtgtgcatcggcagggctgagtatctggaggccctggtgttggtcccgtgtgcagaaccttaagatataacaagatagaagtcctgagctgttctgaccctggagatgtgggcttaactacaagtgcatattcccatgtctttcccagccactgacaagctggaatgcctaagatcgtctggctgccaggaacagctggaagaacaccagcatgtgataggggacagagatccagagcacttcaggagaactcggggagcaggcaccatcttccactgaagggcaggttgttattaatcgtggaaaataattgttctcaaaatcctggttctcttaaaatgcaactaccatatttcatttttctagtgagtagagtcaccaaatttagcaaataaaaatgcggtacagctagttacatttgaactttagataagcagtgagtgagtttttattgtatttctcatggagtatttggtaagcctagctctgagcaatgttgatttctaggtatcctttctctagtttaaccatcacagatgtgactgtgttggaaaacattggttcccagatgtcataggaatggttgataagggatggctcttagaactctgaatcaaggaaaggcccaggaacccacaagtattctacatcttaaccactatcccaaaacagcattgctattgctattgctattcttaactctctctgtagtggcaatgaaaatcccacattctgcacatgtgaagtgtctctccactgtacattgtttccttttaattttccaaattcatattcttctcattaaaataccagacactcacattaagacagagtctccgtctgtggttcaggcaggagtgtagtggtacaatcatagctctctgcagccttgactttctgggctcaagcagtcctcccaactcagcctcttccctggtagctggactataaataagcatgtgccacaatgctcagctactttttaaattttttgtacagaccggctctcgctatgttgcccaggctggcctcaaactcctgaactcaagcaatccacctacctcagcctcccaaaatgttggaattacactgcgcccagctcttttttctaaataaataaacaacacttcgatttctgtttttaatcaccccatccccatacgagatcactattaatcgtggttgaaatttcccacaaagtcagtgttgtcttgctttgcactatcaaaagttacccttatggcctacaaggaattatcgggttggtgcaaaagtcactgtgatttaagccattactttcaatggcaaaaacagcagtgacttttgcaccaacctaatacaaatatttacgattttgatgtgacttctttaaacgtctgaataccccaaatgtgtatttaaaaaactactttgaaacattttaggtaagtatgtatgagtcaaaacatctgtgagggggaaaatgacaatttatctgtatttcaaagatcctatctccaactttaccgaggtacaactcgcgaagggcagtgagagactgtcgcagttttgagtctggtttcatgtctctattctacccatatgtggaggtcatctgataagcatgggtcaccctcatggcaggagcagttccttatccatgctcatggccctaacagtgatctttcacaccattccttgggcagaaacacatttaattattgttatgcaagaaatgtatccttgcaaaccactgaacttgtcacaaggtggtttgtaaacatttctcatgcaaataaccctctggtgactgacagcagtcccttccagggcctctttcctgcagtgctgattcagtggggcgggggtggctggctctcaaggagggcccaggatcccgcattgtttttttgtttgtttgttttgtttgtttgtttgtattttttattattatcctttaagttctagggtacatgtgcacgacgtgcaggttagttacgtatgtatacatgtgccatgttggtgtgctgcacccattaactcgtcatttaacattaggtatatctcctaatgctatccctcccccctccccccaccccacaacaggccccggtgtgtgatgttccccttcctgtgtccatgtgttctcgttgggtctgcgttttaaccactaccccaatctgacccaagtgatgctggttctctgaacacacttcgaagaataatgctgtcccctctataaactgctcacagatctacgaagatgccagcaaagtgacagagaaggcttataggtttaagatctcaaaagaacttcaatccagggttaaagagaaaagcaaaactaaaagttaaacatcagaaggatacctcagtcaaatgagctttccagggttcctcaatcttccccaattcctgagcttgatattgacctgggaaaggtcaagctttaaagttaaatgcagaaccttttaacagctgcctatctggggccgaggagggtacacatgtggagcaggacctggaaggccatgccattcctgtggcccctgcactcctggtcctgcagcacctagtaacccagcctggatcgggcatgacatgtcatgccacaaaattcccctctgcatttgaacgtagtctttctttctcagataccctccatggccactatttttctaccactgctctcttctgacctaaactagtaagtacagttttccctttgttacacactacaggcatgatctgcttttatcattcaatggcaacaatgtcttgatatggtcacttggtgtcctgtgaaaattatttcttctgggacacaggtcgtgtttttgatgcaaataaaaaacactgttgtcagggacaataaaaggcttggcttcctacaaatagcaaaattgagataagaaagcaaagttcacgcaacatagctgagtggacaggactcagctgagtgcctgaccacttaggtttcacagctccatctccaccatccgactacccttgcataagttaatgaacctctctgtgcctctgtgtcctcatatttattgtttttttatgtctcttaatttttatgactcataaaaagctttatttttaatttagctttctgcctctgtgcttgttccttcaacacttttgacaacaattttctgctcctcaataaggacagcatgcttgatcccttcacaggcacatttagcacacatgcaatcaccataggccctgctgacatgtttcagtgttttggacaagctcataagattttaggtctcacagcatgaaacgcttgaacacgctgaatacagattttggtgctttccgaagcttcttggtataaaggtaaacaattttactactatgggttctgtggcagctgagtttagtaagaagctgtattgcaggaaagcctatgacgatttgtcaaacactggaccattctgagtgcctctagacatcatccccagaagaggaaaaagctcatctttaaatcaaagaaaactccagcaacgatctggcgaggaatgctttgaagtttagatgtcagttgatatcaagtgcgtagaatccagtatgctcagtaaatatgagctctcatcatcactagaagagaatgttcagagcactgatgcccccatcggctccatggacaatcatcatcgttcctgtctttctgtgacctactcaataagaaactattattgccactggttagttgcatcgttccattggccacgttaagtacattcatctcccctttcttacctagagcatgaacatatatgcagtctctgagactctgttatccctatacttttcaaacctccgtcaattatagatgtgtgtgtgtgtgtgtgtgtatgtgtatgtgtgtataactacaaccttgagagcaatgtttgtccccaaaataaaacaaggattcattctctctgtctgcccttctctgattctatctttcatctttctcattctttcttccatcctgtctctgtctcagtctctccctcttcctccatctccctctccctctctctctttctttctctctctctctcacacactctcctaaaatagaagtatagtattaagaagaaaataagtaactgcctaatttcctaacataaacattttcattttatttcctatggttcccccaactacccgtgtgaacagaattgagaaactatactaccctggaaaatcgaatgactagaaatgagcttgtaacagccaatctttaaatcctttcattccttccctaccctttctcttccttagctacgtaccattcgcctgtgaggctggcatcctggcaaataagtgaatacatagatttacccacagagaagtcatgttttctctgcaactcaattgttattaaatacttcagagccaacatttggtaagatgagctaataaccacccttcatcctaactcctttaattatttgcccttaaactgccaacagggaagaaaagttggaaagccccaaattctttaattgggactgtacctgcaagcattacacttctaaatgaagcctcaaaggctcatacaatggaatagtgagaaatgttgcagaagaagtcatctaaatatgccatgaggagttgtacagcttcagaatccagtggacttttttcaaagggagaatgcaattggggaagagaaagtggaagacagagggtctgagatcatgaagtcttattctgatgagaactaaaacatttcctagaaaccagaatgggaagtcagtttttacaggttctagcatttcacaacttccgaagatgtgcaggtggctaaaactgactttttatttcttaaaaaaaaaaatctacctggcattgcatttgcaagagggctcaggcctgctgctgctttgtgatagaataattaataattattattataattactaattattataattaataataccagaagtccatggtaccattttctcatgagaactacacaatagctaagctttctggaaacttaaaacatctcaaaatgcatggtacacttttttttttcaccaaaatttccctaaaatatactattttacaaggttaattcctagaattacagaggaaaaaaaccctgaaattttgaattcatgcagaagaaatgaactatagtagtttgtactttctgaaagcatattctctgactttgttataagagttccaggctaggcatagtggctcatgcctgtaatcccaacactaagggaggctgaggtgggaggatcacttgaggccaggagtttgagaccagcctgggcaacatattaagaccttgtccccacaaaaaattaaaaaatagccagctgtggtggcacatgcttgtagtcctaactacttggaagctacggaggattgcttgagcccagaatttcaaggcttcagtgtgagctgtgattgtgccactgcactccagcctggacaacagagcaagactctgtctcaaaaacaaacaaacaaaaaaatccagcatatataaaatactttcttatttttctgaccagggtttcaaaaagggaacaacccaaatgtgatggtctacctagtaaatcacaaccatattcatatctataaactcaagttgcttaacaaaggcaaattaggatttttttctctttaggtgtttgttaatacctgtaaagaatgggacacagtggaaacgtgatgcgatatatttagtctagtaccaatctgagttaaaatgaaggatgtaactgaaagaaagaaatatgatgtaaagagagatttatttgtatattatttccctaagacagtttccttctagaaacttctagaagttgaatggctatgcaaaagtatcttcttgtttcttaacttgtattgccaggatgcattgcactgaaaacggtaaagtggaatgagatctctgctttccttagttactctcaaattaacagctggttaacaaaagccgtcttaggtattagtagctcaaaaacctcttctatgtattacaaagccctacaacaagtgagcccaggaggtcaatgaaaatgcaatgtatggacttttcctatccaggcagggctcattttccattgttttatttctgaaatgaagagcatttccaaagctgtttgaggaagctgggctgcttgatgattgaagagacatgtgatgaacacccaagttctccatcttagtcaccacatcagcatcagggatgtgataatagctgtactgtcctaaatgcatactttccaaagattggccttgcttgctgctttctggaaaggaagtgtccaatgcatgcctttcttctttaggaaaaaaaaagctccattatatgcagcttcagtaaacatctccctttggtttgatttcccactcttcagacaattaattatactcttcaggctcctaagagtaaaatctaaattcattactttttttttaaatttatgactttaaacagaaaattaatgttactgaaataaacagaactttagaaatcaagccagtaactgtatcccacccaccccctacaaaacaaaacacaaaattaaaatagcaagtcaaacgaaaattaaatagacaaaaattaaaagccaaaagtgccatgtgattgtgtgtacagtttatcaccctgtaaaaatctagatgaattggtgcaatgcaaataaaacttcaaataagtacatcaattttaaaaagaaatgaattccttttcccccataaaattagaaagtgatagtagagaaaatgagaaaatgttgaaaagataacagatgtgttggggttattctgtttcagactttacccaagagaaagcgattggagaattgcctaatcctggtatcatgtttccggctatgacaggaagagatagatcataatagataaaaatggaaaatgttgtgaaaaaatcaaatacttctaagaaagacaaaacgcaagactcagctgtggtgagtgttaaaggaaatgagtgtcgcaactagatgaagctcaagacatatatttaaacatgttctaatggtggaacagtgagaagaacagctaagaataatggcctaagacagtctcagaaacccagggctcagcccctgactctttaccctcagtgattctccccatcaaaccccatgatctgtctgggcagtcttattctcaacacctcccttgatggaagtctaatctcagcttctagatattctaaccagaggtctaagtcaatcctttctgaaatttaaattcaattctttttttaacctgactctcaagagaaaaattcaggtactttctatttccaattcccttctctaaactgaaacataatgtaacttacttactcttctccccatgaaatagcttacaactttttgacctctaccaatggaataactctcacacacatactcctatgatcaggcctctgataaatattcaattatgttttccacttcttcccagggagttgcctgcaacagaaactgcaaatggcatacgaaagtttcctaattaaaaaataaaccatatgagtgatcatctgcttaacgtcttcctcctcactagaatatagggttcataacatcagagaccctgtctctcattcttagctgacccatggcaagtactgaatatgcatttgctgtatgtctggatcactgagtgagggaatgaacggaccaacacaactcagggcagaatttgtcttttctcataaccccagactttcccatctgttttgttaacttgagacacaacacttcccagagaagtgaacaagctagtactgaggtctggggggccttcacggagaatgctggtgttcttggaaaaacacgatagtggttgaaggaaaaggaaatgcagccatcatttgttccaagggaactaagcctaaatcaaacacgtttgacgactcagatgggctccaaaaacaaatacagaaatatttattacccgagtcgttaggcagatttagaacaagcagacttgtttagatctccttttataaatagagttaagtacaatatgctttttcaaaaatatattttttaattgtaaagactcttgggattgtctggtagagaaaaaaataataaccacagcaacattccttgaaacatacctttctgattactcacgaatcctcatgaaaacattttggggtaaaagacattagtatttagtttaaaaatataatcagcaaatccaggagagagcagcttccctgaagataactccctacactgatgctggggttaaaaggggtgtggaatgttccatcacctcactgacaccctggaccacctgggagccagctgccactctcatctttaacccagacaccaagttcactgtccccgtcaggaccatgatcttaacttcagatatgcatcagaagcagaagaaaaacaaagctgtgttctataaacagtagtagtatcttacattttgcatagtaccttgccatttacaatgagcttctatgtatattatttcacttaaagaccaggacaatcctgtgaggtagacatgctagtactatgaatgcctgtttaatagacgagaaaaatgaatctgagaaggtgaagtgggttgcccaccatcatgtgttagccaggtctagagcctaggacatctaaacctcaaaggagtgggagtcttactaccaactgtggttagatgacagctaccatttgccctctattcaagacagatatcaaaaattagattcagagcctagcaagtaagcattcatctgttaaaactttatttttccatgttaaaaagctaatggaaaggaaagagtagagagggaagtcgtgcttagtatctctgtgtctcagttttctcatctgtaaaatgggtctaactatagaaccaaatgcacagagttgttgtgagattgtaaagaccctgtaaagttgctgacgatggcctcaggatggtagacagtgttcaataaagcttggctattaccataaatgagatcgtccagacaactgcaataggaaacttattttccatctcttctttcacaggatatctggcctgaggtgaatccaaactttaaaaggtggattaattatggcagtaagttaataagtcactatcatgtagattataggagtgttttctttaaattataactaaattaaagagagtctgtgctagaaggataagcacatgcttggaaccaaacagatgaggcagtcctgaaaatcaatctctgctgctttctggtgttgggttctgagatactctgacctcctcgttcttgatccatgtccacatccactgctcatgcttagacatgatgagcctttcttacttccttttatacacagaagtgatgctaaagcaagtgccttcctcttcttttctgagaaatcttgcagtacagaaacttgttaaaattagtttaacccatcattttccaaacttatgtaaacacaaaatgtttaagtattaatgttccacaaacatgatctgggaaacactgcattagagtacaaaatgagcaaaagtcgggaacctcttggataccattgaaagttgacagttgagaggtattatcacctatgagtaatcctgtgacgcaaacccagagaataactttttggctgccccagtgagttcccgagaacatggatgaacctcggtcccaagctttatacaaagttagctttagaatctttccagatactgctggctctggctacatagtagactaagttattatggaaatcttaatactgtaaagcaataacaatgttgaataaaataaaaataagttaaaaatataactgtgtacacaagaaagaaagtaaaatcacagattccagaaataaagagggaactgaaagcagtgtttgtaagcactggaactgaaactggtgagcctagggagggaagaaaagaaagggtttgggaggaaggagattctaatggcttgggaagtgagaatcccagagattggagaccaggtttttggctcactcaaggtgggatgttgacactgagacattttcataaactcagaattttcaaatgaccccaccccaattattctctatccagctagtcaacattgcaaagattttctatgcccagagatcttcatggagaaggaaagatccccatgaaaaataaaaaccctataccagcatgatgcataggttgagagactgccattctactatctctctggtattcaaatcctcagaatgagaatttaacataaagtttgcccagcctggtgagatgctggaggactcacattagcaaatgcaaaaccacttcagagagactctccttaactcaggccacaaaatgtatttctcactgaaaataagtgcatagtaaaaaatactaaaatacaccaacaaatactccattatcaataaactcaaaaaacagaaatatttgaaatctaaagacatcagggaaaaaaatctgaaaaaaactatcaattcaagatgttaaagataggaaagaaagaataaagctcagtaggtaaaaataagactacatttacaaaaaagtataaattttataagaatgaaataaaacttctagaaattataaaataagatactaaaattaaaactcagtagatgagttagtcaacaaattagacaaagccgaagaaagaaatagtgaactgaaagtcagttctgaggaaattatacagaatgaacagaaagacagagattttaaaaatggataagttaagatatggtagatagaatgagaatagctagcatgaagctaataggaattccagaaggagcaaatagaatgtgagagaagtaatacttgaagagacaatggtgaagaattttgtaaaaattgatgaaagttgtaagtccttagattaatttaattagtaaattcttagctgaatgaaaaataaattcacacttagactaaataagtggaacttcagaacatctaagacaaagagaatatgtctgtaaaagctagtttaaaaaatttacaatctaacagccgttagattgtgaagaactgatcagcaacagtagagtcaagaagagaatgaagtaatatcttcaaatggctaaggaatattagtaaattaagaaaaaaatgaaagcgtttgtactctttgacctgcactgaaataattattaaaatatgatctctgtaaagaaggaaattgaactcagaaagacgtggtgagattagaaaaaaacaaaaacaatagtgagtagtgagcaaaggcatttataaacatagttctatctcataaacatgagctataaatataacagtaatgatgatttttatttatataaaagcaaggaaaaaataaatattagaccacaacatgatagactatttggggttttttacagttataaataccttctaaggtatttatattgtggaaaagaagaatagaaaagggtagagataaaatttagtggtttttttttaaaaggttaagtttacttgttaacataagggtggatactgaaaatggaaataaaatgcatgcttcccaaagcagggaaaaggtagggtaggggtcagcacataaagaaaactcaatcaaatatgagtatgaaaattaaatttttaaaaaagaaagtaaaagtataacaaatgcctcagttttaacaaccaactgaacatataaaaagagagaaaattaaccctcatcttgcattatgtggagatatatgtcccatataaattaaaatcctaaaaataaaaagatataagtataatatacagtatatatacacacacatagcatatttttataaacacatacatctctatgtatgtaaatcatatattatatatatatatagctaaaattgcaggatagggtaatgatgtcttagaaaaccaacaaaagaagcacaaaccaaaaggaaaatgattgatacaactgactctattgtaattaaaatgtctgtgtatcaagagggaccattaaaaacttgaaacaagcaaagacttggaggaattattattactttctgtggctgagaaaatgtttcaaagatggctgctgtgatatattccatcgcatcccatatgtctttcttaagtgtgatgttgacactcttcccacagagtggcaaagttcacgtcccatacctttgaccctagctgaaacttccagtctgccttgatcgacagagtacatggagagcaaggctaagtcagttctgaggctgagccacaaaaaacatcatgcacttctgctttgtctcctgtgagacttgctctcggaacccaccaccacactgcaagggagcccagggcacagtggaggggccatgtgtaaatcttccaactgatagcctcatctgaggtcgagtcaaccgccagcaatagctaccaggtgcatgagtgagtgaatgagcattccattaacccaagccccagccactacctgactcagctgcatgaaaaaccccacgtgagcctcctggttgggtccagtcaacccacaggaccatgagagataataataaagttactggtattgtttgaagctacctagtttgggataatttattgtatagcaatgcataactgacacactattcaaaatcaaaaagaaaacaataactcaataaataacatggtgaaaaaaatatgaacaaataattcacaaaagaggaaacatggttagatgacaaagacacaaaaaaaagactcaacctcatttatatataccagaaatcaggtagatacaaatgaaagcaacagcctaagaccattgtacacttacctttttgtcaagaacttaaaactcttaatagcaaatattgagagatgcaagctacagtcatggttaagagggcaggctcaggggccaggctgccaggcatctaattctagttccactcacaaactttgtggccttgagcaaataatataagctttgtatacttcaatctcctcatctgcaaaatgggtttctgcctaggattgttgtgagagttaaatgagttaatatgtatagagtgcttagactgtgcctggcagaggaagcaatgaataagtgtttatgatgacaataatgatgacaacaatgaggaaaacctagaagtcttgggcagttttggtaggactggactatcaagtggtataaccaagatttagagagcaatttttcaattctcttgttgaggtgaagatgtcaatacccttcaactgaaccattccacttgtagaaatgtggcatagagaactgctaggacatgcacagtcagacacaggcaaggatcttcactgtgacctcactttctaattgcaaattctggaaacaacctgaaagtactcagagtgactagaaaaagtgtagtaatgggcattagctcggtttctaggcaaaggagcctccaacactaaggataccatttcattcctggggctgaaggctgtctgatacatggaagaatagcgtgggaacagtatgaaacattgtctgccatccaaacatttggagtagaaacatctcttacactcaggaggaggagcatgaggttgatggtaagggaacccccaagacccagtgtagaaggcaaagctgatgagccagttcaggacaggattgatggtataggacaatcgtttctgtcctgtgggtctttcccatcccaccttagcctttctgtgttttttatattggtacagaaagatgaataaatcacaagtgtgaatcatcatggagtagcacttagaagctccaacttcaatcctgttcctctactctaagagacatggtggggcagcctcggccagggtggtcagtccaattcagctttcatcagtaactagcagtgcagttgcatggcctctgtgagtgtaagtgaaagtcttgagttcaaatcccatcagtgccatttaggagttgagtttcctggaacaggacacacaatcttaataagccagcaactacatctgtgaattgggactagtcatatctccttccaaggacattatgagactcaggtgtttgttaaaacaccttataagctctaacctcaatggcaagattgactattctgcttgtgagagaaaacttggatttctgtgatccagtaattccacacagtgtagcttggatgtcagaaatagcaacaaatctggagatgatttaatacaaccctagagctcccattataaaatttacatagccattttttacacattcccatttttttgtacacataataaatcgtggtgttagtcattggtcttttaggacaagctattaaagcaatagaattcttaattaatttagtgcagagtttatcagttctgtgtacaaagcttactcagagcccactacatcacccaagtgtggggttggataaagtcagctcccatagaataagccttatcttgtgccctgcagtttccagaagcaattcttcctaagctggagatttgttatctgctagccccttggtaatgcatttcctggaataggtcatgagtagttgagtcaaaaccttctatagaattggctcagcactaatagaaaagggtcactatgctgccacgagactcacaaatatctgaatgtacatgtcaaaactagacttcgagtgttcagaaagagacagaaaatgttataagtaaaagaagttttcaaagcatttctgatgtttaaaaactatagagccagtagcattatatggtgtgtaactacagaaaatattttttctaaataataatcattcccatataattatttttcacattgtaccttttcttaagttcatgtgcaaatctagtcatagtaagtttagaatgtacaatacataaaagctttgacacatcctgtcatgccattttaggaagcataacgatgtcccatcactttctctctgcaagggaaccagagtggggggatctttaattcatttcaaacactttgacaaattctacatgtggaaaaacacctatgtctcattttttactctgcctcttcccctctaccatccttaattcccacaacagaatattctttgcagaaaaaaggggagcgaggattcttaagcgaagggtgttccctattgctgatttgttcaggaataaataaaaggcagactatgatgcattcattgctatatctgccccacaccaccctcttcaggccccatcccactccctccatggccctatgctcctcagatgacctcatctccctctttacccaaaactagggggtatcaaagacaattcccttgttcactttccctccacctctaaactgatcttaatcacccttccctccctactactcctccataagacatattattttagtagataacccctccatctgggcccttgattttaaccctcccatctcttttggaccttttcccagcaattactgccttttatcctgtatctctattctatgtctaatggctctactggttccttgtctttgaattataagcaccaattgtcttgtccatattacatgtgtattttagatgtcttatatgtgtgtgtttctgcatgtgtttgtctatattcaaaccctaaaattatcttttttcttcttgttgttgcttccatattttccaaacaagcgaaaattccttcttgccttccttagcatcctattgaagaaactctctaaaaggccacctgtagcatgaaccctaccaaatctccaggcctattttcaatcatcatttgcctggaactctctgagacattttctccccagcaatgcaaagccgtcgtcttcccaccactcattagctcctgctcttgaaagcatctttcctaagctcagaatcatccagcctgtcctcctttccctttgaccactgctcctgattttcttttgcttgtttctcttatttccattttcaaagtgttcaaagaccctgcccaccctcttcttttctctcttctccctcccccacaagtgatatacaagtttttggtttcagctgttgctgccctgtggataatgctgaggcttatttctgaagccttgatcacttcaatggagggcagggcacattttcagctgtcgtctccagtgttcactagcacttcagaggcttccttcctttcaaacttgattctctccttcccttaatcagctcctccttctaatgtccatcctacttttgctaatggcaacctggctggccaattagcctggcctcaaaccgtggagaattttttaacccctccccttttgcttcctatattcaatcagatatcagatcttgattctacctaagtggtgtgtatcctcttcttgccacattacctatgtcaccatctctagtctcttccgttctaatcacatttaaaattactctaaaactaatatttggatgcatgaatcatgtctcttcactaaaatgttcaatgacacctaactgtttataagagtaaactttatctcctcaatttagcaaagacctttgggacttgacttctaactgaatcttgaaatcctatttcctataacccccttcgctaccatgaaactcttatctgtggccaccctgtgttcccctgtaaccatgacttatctatagtccttctgctagaaatgttcactctccatctccacatgtggagatttaaaggatctgtggtgcctttaaaggtaaggttgaataatttctttttctgcaaagcgtttcctaatcctttcagctgatggtaatcttcccatcctttgcagcccaaattattttcctgctgtcaatattacataatttggcccaactgcatccagtagggggaagaaaatagatgcatagatgcatactacaataccatgaatgtgtctattttctcctccgtacttgattagaaggtcctggaaacagagatcatgcttgcttctcctctgtgcacctctttacagtgccctagcacagtaccttgcacttagtagatgctcaataaatgttgatgtatgatatgccatggcagctaagagccaggtttcagagttgaaaccagagtcacgggattatgatcaaatgaactcaagctctctaagcttcattttacacatctgctaaatgcaaatgacagcaatactgcttcgaagaatgattattgaattaaaagtgaaaataatgcatagaaaacccttaacatagtgcctggcacattttatgttgtactattaatgcttattgtgacagtacagaaatgcgggggtttgttgtttaagtgagtataaaacgttgtcatttttctctgggcaattggacaatgggtataatagctttaaaaatttgatcctgcaattccatttctgggaatgcatcttaaggaaatagaggcagttcattgcaaagactataatgagatagaaatgtgtataatgcctaatgaaggaaagcagcacaaatttccaacaggaggacattggtaaactttgaaacatctgtaagaagagacatgaggcagttactatacttgctttgggaaaaaatgtttacaatatattgtaaagtgcaaagtaccgggggtaaaatagtttgtagaataaaattttattctggtgaaagaaggtgcatgtgtcagtagtatttgtgtatgtgtgaacatatgggaatataggacacaaacaaaaatgtttgacagaggcactatatggcatgaaatgatttttatttcttccctgtgctttttttcatttttaaacttttctgttttatactctgaacatgtatatttttggtagccagaaacaaatgttcctatttgtatgtctatttttttcctttttctcttcaagcatgcctacaaataaataataaaacattctttttaacaactcatctccctgagccctgcaaaacagagcacctcctcctcctcagctgttaagtgttcctcatctggactgagggtaaaacaaacttagaatgaataaaccaaggttcattcatgcattcatgacaaggaatgtcaaggcaaaaatcatgtaaagaaactcatcagagccctctgtaaaccttaacatgtagaaagataggatgttttgtgtccaggccagggttgtggaggtggttgaaagtggctcccattggcgactggttgttctgggtggttctgtcaaaagcacagcccactccgtcatcacagtggcaggaacactgggctttagccacaccagaagcattcaacacaacaggtatgtccagaaatggagaattcttggagcttttgctaatttcaggaaggcagggtaaaagagagtgggtagggagggcagaaggttgtcccttttataaaacatttattgatattggttatcaaatcaaattgattattggaacctgagttaaagaataaaaagatctgaaagtagttaaaagaattacacaaggtataggtacaaattatactacttttaaaatttgagctattataagtcctaaaatgataagtaatttatactgaagcagagttaaaccatctctactgtgaaaataagttaactagcaaatggcctggaagatgataacattttgtgctctcttcctgccaatgaacaatagacataaatgcttctcttctttcaagatctcttctgaaaagaaagcctaattcaaagcaacaagttgaataaagcttctatgaaaatgcaagcaaaactcttagactaaatgcaattcagggaccgccacagtaatggatagtcagtgcatcccgcatcctgtctccagtgatagttaatgcatgcagactatgagggggaaaaacctaaaccatatcacttacaataatgtaattctgatgtgagaactcataggcttccttgacctcaatgatgagcatttgtcatttgtcaagcattagatttaattacccttatttatgtgcttatccaggcttcctggacatgatggtcccttctcaacacatagcaaaagcagaatgaccagtcattgggaaatacaactgaaaacccaatttggagatgtatgtctctagtttgacaacatcatctacagctgatgacctgctgttccgagggcagggtagctctccctttcaaaatgtaccccactgtttggctgcctctatggaggtcaggaaaagaaagtcgctggaacacacagtggacaggtgggtttctatggttcctaaatctgttatcagagagctggggggaatggagactccactgcccaagtgcctcgagggcaaaaagaagcctggcaggaataagggaccgaggcagcaggcagggagcaccaacatcatattctatgcaagtgttttcttgttcctcttgagcattcgaaaatgagaaaggggcatgtgggtcgaacccctgaaagatcgacttttaagtgctttttcccctggagaacgtgcgatggagaggaagagaaaagtgagcttgtgttggaggcaggagctatttgaaaaatgattgcttgtctctgggtatctgatgatgttagggaaacaagaagaaaggctcaagggcaaatggaacactcaaccccaagcgaggcctccatgtggggccttctcatctgtcggagggaggctttggggatgcttaattaaagaatcaaagtaggattctcaaattgcttttctgtatccactttgtcctgctggattttttttcttattcaactataaaatacacacattttttgctctttatttatttgttcgttcatttgttttttgagacagagtcttgctttatcgcccagactgaagggcagtggcacaatcttgggctcactgcaacctccgcctcccgggttcaagcaattctcctgcctcagcctcccaagtagctgggattataggtgcccaccaccacgcctggctaacattttaattacactaaaattagtagataacatttctactgctaagtttccattattttctagtctaattattttacctccaaacaaaactaaaataacttcttacatttcaagtgaccttaaaaactgtgctcatggttgatctggagattgacctttaatttgggaaaataaccttatttatgtcaagaacctttattttaaatgaactttacaactccccacacaagtggacacacagtgtagcaactgaatgcatgtttgttgaatgagtcagtgaacaaatgatcatgaaggatgatgattattaaagaaaaaggtggaaacccaaaccattgtctagacatgaaaatgatggacagtttatgcaaatcattcctaatgcaaaatttcctaaggaattttcatgtggttctttcagcttttcctgtagattaaaatcagctcagtcctgacattttaaatcctttctataggaaaggagaataggaaaagaagaaaaccaaacataacacatgcacagaagcaaaactgcactgttgatggagtttagctgagagggtagggtgtgtttagtcctttaataaattgttatcttgtattgttgattaaggcaggacatgaatgccttgtatttgctgcatttttgatatccttgatttcctaagaggacaccgcaccctgggaaaaaagagaggctggctggagcagcaggcagcacacgccattagaggcagctctcggtagcagtggcctttccggcagctggcgtcattataggaagaaatggtttctaattgtgctattgatttttctccctctttaatggattattctcccaacacactctaagttgagacactaccacataccacaggcatgttgccagggatgtatgtaaaactatgcattgcacgcacatggagcttttccctgtgtcttactcagcaggtggaaaaccccaggaaaagggatctcgacagccgtgggtgagcatgtgcttactccaagtgcagcctgggtgagtgcttcacgtatcatttcacttagtcccaagaataccctaatgacgtagggtctgctcattttgtagatgaacaactgaagctcagaaaggtaaagaaacatgaccaggggcacacagctcgtaagacacgggccaaggattccattccacgggagtccaagtccctttatcttggaagtgggtaccagaggacagggtccccacaaacatgggacctgacaaggccctgccctcagaagagcctgtgctttgttcgattctctgcagtcactgtcttgaaatgctcaataatttttggattaggagtcccacattttcattttgtatgtggcacctgttatggccccaggattcacatgttgaagccctaacccccatgtgatgggatttggaaatagagtattttggagaaaattagggttacataagtcatggagatgggacccccatgataggattagtggcattataagaagaagaagatagatttctcaatcctctgctcatatcatgtaagaacacagtggccgtctgcaagctagaaagagaacccttaacagaatctgaccatgccagcactctgaccttggacttccagcctccagaactgtaagaaataaatttctgctgtttaagccatccagtctatgatatttttgttatggcaacttgacctaagactcatatctagatcaagttcacacacaccacaggaatccagcatggtctcaccacaatggtgggtaaccttgaccccacccaccatccacacttcaccttgactaacacatgatagaggcatttcactggcatgcactgtatatggagtgcaagctttgagcaaagcaaaatcaaatccaagcagaatagattcctacttttctgttacaccagcaagaagaaaatgcatgtaacgaattgttcctacattacacttgaaaaaaaaaagtatacaagtgatataccatattaagaaacaaattatttgtggacactacagagtatttgtacctgaatcatgttcaattgaagtgaattccaatcctttgaaaattgggaagccttatgggagctattctacggctttgttgagtgcaagtagtttatttggaaggtgcagaaatgggagaatgaaacagggaaggaggaaaagccagtgaatggatgttactgagctggacagcaatggaaatccactaagaaatcttttagaaagtgcctcgcatgtcctctgaaggatgggaaacaggcatctacctctggctcccattctccagtgattaaaaagtaccttggaaagtgtatctcctccacatttacgggctgctctgtgatggatcttggcactcctgccttcatagaaagccctgaaagaaggaagtccagggatattgagggttgcccttgaggtgggattctatcagcctgcctgggagctgtccattcccctcacagctgaaatcaaaggggatcagcacttgtgctgcatggcaccaaagcatttgctacacctctgatctgttgacccaacagattcatctctcaatgcaattattgttaaatgtgactacccttcagtggttctttgctgtctcctgcataaagaacaaattcttcagcccagttatcaaaggcttcaacattccagataaattttcatccaaattagcctagttctcgtattcacacacaaactctgctctaagaagcacagtctcatgtccccctagacactttcctcacatcttcattcaattcctctcacctgaaagaaactcctacatcttacctatccttccagaactagctcaaatcttcccaacactgtccctatatacctctccacttcctgggaacttaaccacactgtgtgatgtgtattgtctgttatcccaataaaatgtatataccttctcaagaaaatgaattttcttactcctcctttatctcctacaatatctatgtcattgcatagttacacattacatcacattaaatactgttaaaatgtgtattcaggaaaccagaaagatgtatggcccagtagttgtgtttttctggttaactctaattaatttctctctatttcagagagtgagggtattgggtgcccaaagtgggttattataagaataaaaaatgatctcataggtagagagaggaaccaaaagcacagctggtccacacaaccgggaaactctcaggaaaaaaaaagcctcctcattactcaatagccctgtggtcttccttcttcctctatttctcactgtctcttgggatttttcctgtctgcctcttctgtctcttcaatgaagtcaatgtagacaccagtcctgcgtctattaggtgcaatagccatcaccaattggagagactctctgtctctgtttaaatttgtaagagagatactgattggtcactggccaacaagctgatgggttggcattgggtcaggtgtccacttctgctccagtcgtttatggcaaacctggtgaggtaaaggagccaagcatggccacctgggccaacctcctcagcagggattatgagaacaagtccttagaaaacaggtccaggagtctagcacatgcgctaaagcatgccatcaggtgtgaatcattaagaccttgaatgtgaataatgtgtgtgaactgggcagagctcatgaaacacgtaataagagacacaattaggatttgctaaatactggtcctaggagagcacagtgtgtatgcaggagcgtttctataccagctgtgctctttcatgcctgtccttccataactgtgggatgccctttacacatcacccgtcatcaaagaccaattcactcaccaaaggctggaaccaacgaagagctgctctgcttccctcacagaaatagtagctcctacagcaacatgtcttcattcattttttattcattcatttattcatttattttattatttcttgagtcccttattcgtgccaagtcttcttctaagttctgaggatacagttgtgaacaaaacaaagcccctgcccacatacactttccactctgtctgaaggagaccatcaagaaacacttatcacatagacacttggtcagctatggagaaagtactaagacaagtaacacagggtaagaaaacactgatagaaaatggtatttagggtggccaggaaaggcctttcttaagaagtgatatttgaatagagacttgtgcaaaggtgtaaagcagatgaagacctgagaaatatgttctaggcagaggaaacaataagggcaaacctcctgaggtgccatgttttgcatcttaaatgtacagcaagaaagtcagtggtgaagagaaggaatggctggaaatgaaatcagagaagtggctatggcccagtttatacacacatttccccaatgccatcttctattgcagtatggctaatactataagtagggctggttttatagacaggcaatcttggagttacacagggacctttgttcacaatggtccctgagttgactcaatgatgttatgtcatcatcttgaaattctaagtttttgagcaaggggctccacaaataggtagccagccctgctgattataattatttgtataaatgttgaattctctcttttttgttttagattttgagttcctgaaagcagaggatgtctgatttattataaatttttatttgtaaacattaattttaatcaccctgataactgagtgccattcatagctcaaaagcagtgcaccaaaagaaacatcaaatgacaatttttttttcaaatattcagagcaaatactactttcaagagggaagtcaccttgtattccactaaatgcaagagtgtttgaagcatgaacatggagtctccattaatatatatatatttttttaattatactttaagttttagggtacatgtgcacattgtgcaggttagttacatatgtatacatgtgccatgctggtgcactgcacccactaactcgtcatctagcattaggtatatctcccaatgctatccctcccccctcccccctccccaccacagtccccagagtgtgatattccccttcctgtgtccatgtgatctcattgttcaattcccacctatgagtgagaatatgcggtgtttggttttttgttcttgcgatagtgtactgagaatgatggtttccaatttcatccatgtccctacaaaggacatgaactcatcattttttatggctgcatagtattccatggtgtatatgtgccacattttcttaatccagtctatcattgttggacatttgggttggttccaagtctttgctattgtgaataatgccgcaataaacatacgtgtgcatgtgtctttatagcagcatgatttatagtcatttgggtatatacccagtaatggaatggctgggtcaaatggtatttctagttctagatccctgaggaatcgccacactgacttccacaatggttgaactagtttacagtcccaccaacagtgtaaaagtgttcctatttctccacatcctctccagcacctgttgtttcctgactttttaatgattgccattctaactggtgtgagatgatatctcatagtggttttgattttcatttctctgatggccagtgatgatgagcattttttcatgtgttttttggctgcataaatgtcttcttttgcgaagtgtctgttcatgtcctttgcccactttttgatggggttgtttgtttttttcttgtaaatttgtttgagttcattgtagattctggatattagccctttgtcagatgagtaggttgcaaaaattttctcccattttgtaggttgcctgttcactctgatggtagtttcttttgctgtgcagaagctctttagtttaattagatcccatttgtcaattttggcttttgttgccattgcttttggtgttttggacatgaagtccttgcccacgcctatgtcctgaatggtaatgcctaggtcttcttctagggtttttatggttttaggtctaacgtttaaatctttaatccatcttgaattgatttttgtataaggtgtaaggaagggatccagtttcagctttctacatatggctagccagttttcccagcaccatttattaaatagggaatcctttccccattgcttgtttttctcaggtttgtcaaagatcagatagttgtaggtaagcggcgttatttctgagggctctgttctgttccattgatctatatctctgttttggtaccagtaccatgctgttttggttactgtagccttgtagtatagtttgaagtcaggtagtgtgatgcctccagctttgttcttttggcttaggattgacttggcaatgcgggctcttttttggttccgtatgaactttaaagtagttttttccaattctgtgaagaaagtcattggtagcttgatggggatggcattgaatctgtaaattaccttgggcagtatggccattttcacgatattgattcttcctacccatgagcatggaatgttcttccatttgtttgtatcctcttttatttccttgagcagtggtttgtagttctccttgaagaggtccttcacatcccttgtaagttggattcctaggtattttactctctttgaagcaattgtgaatgggagttcactcatgatttggctctctgtttgtctgttgttggtgtataggaatgcttgtgatttttgtacattgattttgtatcctgagactttgctgaagttgcttatcagcttaaggagattttgggctgagatgatggggttttctagataaacaatcatgtcgtctgtaaacagggacaatttgacttcctcttttcctaattgaataccctttatttccttctcctgcctgattgccctggccagaacttccaacactatgttgaataggagcggtgagagagggcatccctgtcttgtgccagttttcaaagggaaagcttccagtttttgcccattcagtatgatattggctgtgggtttgtcatagatagctcttattattttgaaatacgtcccatcaatacctaatttattgagagtttttagcatgaagggttgttgaattttgtcaaaggctttttctgcatctattgagataatcatgtggtttttgtctttggctgtgtttatatgctggattacatttattgatttgcgtatattgaaccagccttgcatcccagggatgaagcccacttgatcatggtgaataagctttttgatgtgctgctggattcggtttgccagtattttattgaggatttttgcatcaatgttcatcaaggatattggtctaaaattctcttttttggttgtgtctctgcccggctttggtatcagaatgatgctggcctcataaaatgagttagggaggattccctctttttctattgattggaatagtttcagaaggaatggtagcagttcctccttgtaactctggtagaattcggctgtgaatccatctggtcctggactctttttggttggtaaactattgattattgccacaatttcagctcctgttattggtctattcagagattcaacttcttcctggtttagtcttggaagagtgtatgtgtcgaggaatgtatccatttcttctagattttctagtttatttgcgtagaggtgtttgtagtattctttgatggtagtttgtatttctgtgggatcggtggtgataacccctttatcattttttactgtgtctatttgattcttctctctttttttctttcttagtcttgctagcggtctatcaattttgttgatcctttcaaaaaaaccagctcctggattcattgattttttgaagggttttttgtgtctctatttccttcagttctgctctgattttagttatttcttgccttctgctagcttttgaatgtgtttgctcttgcttttctagttcttttaattgtgatgttagggtgtcaattttggatctttcctgctttctcttgtgggcatttagtgctataaatttccctctacacactgctttgaatgcgtcccagagattctggtatgttgtgtctttgttctcgttgctttcaaagaacatctttatttctgccttcatttcgttatgtacccagtagtcattcaggagcaggttgttcagtttccatgtagttgagtggttttgagtgagtttcttaatcctgagttctagtttgattgcactgtggtctgagagatagtttgttataatttctgttcttttacatttgctgaggagagctttacttccaactatgtggtcaattttggaataggtgtggtgtggtgctgaaaaaaatgtatattctgttgatttggggtggagagttctgtagatgtctattaggtctgcttggtgcagagctgagttcaattcctgggtatccttgttgactttctgtctcgttgatctgtctaatgttgacagtggggtgttaaagtctcccattattaatgtgtgggagtctaagtctctttgtaggtcactgaggacttgctttatgaatctgggtgctcctgtattgggtgcatatatatttaggatagttagctcctcttgttgaattgatccctttaccattatgtaatggccttcgtctcttttgatctttgttggtttaaagtctgttttatcagagactaggattgcaacccctgcttttttttgttttccatttgcttggtagatcttcctccatccttttattttgagcctatgtgtgtctctgcacatgagatgggtttcctgaagatagcacactgatgggtcttgactctttatccaacttgccagtctgtgtcttttaattgcagaatttagtccatttacatttaaagttaatattgttatgcgtgaatttgatcctgtcattatgatgttagctggtgattttgctcgttagttgatgcagtttcttcctagtcgcgatggtctttacattttggcatgattttgcagcggctggtaccggttgttcctttccatgtttagcgcttccttcaggagctcttttagggcaggcctggtggtgacaaaatcggtcagcatttgcttgtctgtaaagtattttatttctccttcacttatgaagcttagtttggctggatatgaaattctgggttgaaaattcttttctttaagaatgttgaatattggcccccactctcttctggcttgtagggtttctgccgagagatccgctgtcagtctgatgggcttccctttgagggtaacccgacctttctctctggctgcccttaacattttttccttcatttcaacttcggtgaatctgacaattatgtgtcttggagttgctcctctcgaggagtatctttgtggcgttctctgtatttcctgaatctgaacgttggcctgccttgctagattggggaagttctcctggataatatcctgcagagtgttttccaacttggttccattctccgcatcactttcaggtacaccaatcagatgtagatttggtcttttcacatagtcccatatttcttggaggctttgctcatttctttttattcttttttctctaaacttcccttctcgcttcatttcattcatttcatcttccattgctgataccctttcttccagttgatcgcatcggctcctgaggcttctgcattcttcacgtagttctcgagccttggttttcagctccatcagctcctttaagcacttctctgtattggttattctagttatacattcttctaaatttttttcaaagttttcgacttctttgcctttggtttgaatgtcctcccgtagctcagagtaatttgatcgtctgaagccttcttctctcagctcgtcaaaatcattctccatccagctttgttccgttgctggtgaggaactgcgttcctttggaggaggagaggcgctctgcgtcttagagtttccagtttttctgttctgttttttccccatctttgtggttttatctacttttggtctttgatgatggtgatgtacagatgggttttcggtgtggatgtcctttctgtttgttagttttccttctaacagacaggaccctcagctgcaggtctgttggaataccctgccgtgtgaggtgtcagtgtgcccctgctggggggtgcctcccagttaggctgctcgggggtcaggggtcagggacccacttgaggaggcagtctgcccgttctcagatctccagctgcgtgctgggagaaccactgctctcttcaaagctgtcagacagggacatttaagtctgcagaggttactgctgtctttttgtttgtctgtgccctgcccccagaggtggagcctacagaggcaggcaggcctccttgagctgtggtgggctccacccagttccagcttcccggctgctttgtttacctaatcaagcctgggcaatggcgggctcccctcccccagcctcgctgccgccttgcagtttgatctcagactgctgtgctagcaatcagcgagactccgtgggcgtaggaccctccgagccaggtgtgggatatagtctcgtggtgcgccgttttttaagccggtctgaaaagcgcaatattcgggtgggagtgacccgattttccaggtgcgtccctcacccctttctttgactcggaaagggaactccctgacccctggcgcttcccaggtgaggcaatgcctcgccctgcttcggctcgcgcacggtgcgcgcacccactggcctgcgcccactgtctggcactccctagtgagatgaacccggtacctcagatggcaatgcagaaatcacccgtcttctgtgtcgctcacgctgggagctgtagaccggagctgttcctattcggccatcttggctcctccccccctccattaatatttttatgaaaactaaaaattcaaaatggaggtcaccctttggaataatgaagaagatataatgggcctcctcactgaatacaaatacaacatatttagagtcacctttgttgttcctttattttcctcaatcttaaccaccactgctgcctacttttattgttcccactgtagaaaatgctgaatatactcctttataattaatttcacaataaatttgaatgcacttgacctctgcatggcattgacaagaaagatgcccaatataaaaacggagggaaaactattcacatctgagtttttcagtcaacccagtctccttatttgttcaccttttatttctactcccagatttccagtgtgcctagaaatggtctccaaactactgcagagctacctccccacaaatacactgaatccatcagaatgtatattaataccaatgaatagtgctccattggaatttcctattttaaaaaacatataaaagaactctcttctctctgtcttctccaccacattccgttttttgacttgttcacattgagctaaacatatgggtaactgggcctcagtaggatcattccttcttaatgtcaaatggaagcagaaatgaataaatttaatatggaaccaggaccaccattttgtgtgactgtagtgatttccaacgaaatatttcaatgctcttcattgctgctgagattttcatagcttggagctttctagtcccaatttatctcatgcatttctattccctagattttttttaaagtaatatgaagtatttaaccctttcctgacccacatccctttcacctccccatctaaaatgaaaaaaaaaaccccaggaaacagccagctagaacaaactctgttcttttttattatcgaaaactatcttacaatttaggcttcctgctctaattctatatgcacatttccagctttctgattaatctgcatttgtggatcagctgccagtgcctgatagcccaagtgctgaaaaactaactgattttcctttttcactcctacctctgtttcagttgtataaccagtgctctcttgctctctctccctctctcccctctcctctctctccctccctttctaccccatctctctctggtcttctttacccccacctcccatccaacattctatcaatggctaaatggttagttccaaatacatgatatctccctaatggatctaccatttttattcccactggcaggccatgcccctgtctgctaggctagtgcagtaacctcccaatggctagctagcctggagtcctcctcaatctcctcaacttccattctgctgcaagtgttaggattctaagaatggtataatctcaagcttttccatagatcccctgctccccatacctactgtatacaaagcaacatccaaattcattaacctggcaccagaatctctctaaattcctttttacttaatctgccatccttgccttacatattgtagtggattgatttgggtccccagaaacgatatgttcaagtcctaccccaccaggtaccatgtgaccttatttggaaatagggtctttgcagatgaaataaagttaaaatgaggtcatacctgaggtggggcctaaatccaatgactggtatctttataagagaaagggaggctgatttggaggcagagatatgaaggagacccagggaagaaggttgtgtgatggcagagggagagattggactaacgcagctacaagcaagggaagatgccagaaaggaccgtcccccagaggcttctagcctgcagaacggtaagaaaataaatttctattgtttaaatcacccagtctttggtattttattatgtttatgacagccctagcaaactaataagccatattttaaaaaggaaaaagaaacaattggaattaattttagcaacatattattggcccaatatagccaatatattatcattttaacatgtagtctatacaacaactattagtcagatattttacattctgtttctggtactgtacagagtctccgaaatccttaggcacctcccaaattcccttcccttcccaagacactcagccttgtctctctgtttctcccaagtgtccaacgtttcaggcaccccagtgagtgagatggagtcagtgagcaacaaaacttaacatcgtgtcgacttgtgtgggattacctgtaatttaatgtttactttttctagtaaaggttaagctctacaagggcaagaaccaagtgtgattattttaccaaagggggcattgatatttcttgaatgcaagaaataatcattaaatgaatgaataagcttgatctttacagcatcgggcaaaactgcatatttgacagatggcctgtatcacattgtagcataataatggcttttccataaatgagtttctgaactttccattagaactttaaaaacgaggaaagaggatctcaggttaaattttttggtatctctcccagtacctcatgtcatccaatatgcatagtagatgctcaacagactataaacaaaaagtatttgaagatatggattgcaatattttttgtctattttctcacccattttgttattacaaatagatgtgagcaaaaataaaaaaaagaaggggagaaagaacgggactccaaaatgaaatggtggccacttacttcttgatttgagtggaatttcttccagacattcaaatggcactttaactaaaatcaaagcctgtcaaatgtgactgcagataatccagattattccaggtctgtgcagtgctcactacttacatctgacaccttcagacactttgtccccactccacccagcaaaaggccagtaattacagactacctcctacctccaaaaagtttgtcttttaaattaatagactctaatttttaaaaaacagttttaggtttacagaaaaattgagcagaaactgcagacagttcccaaagactccccccttgccccaagtttctttttattaacatcttttatcagtgtggtacatttgatactgatattgatacactactattaactaaattccagagtttacattgggaagcctctttgtgtcctgtattctacgggttttgacatatgcatgatgtcatgcatcccccgtgatggaatagtgtcactgccctaaaattcccctgtgctgcatttactcacgcctccgtgtctccctccaaatccctggcaaccaagtatgcatttatgcaactataaaaatgcaggctttatgcaaaatactatgtaactaccttctaatttaatattgacttttccccgggaaatccaaagtattggagatttatcataagtgatcttttcactgtctctatagttttgccttttccagagtgtcatacagttggaatcatacagtgtgtagccttttcagattggctgttttcacttggcaagaagcatttaagattcctccatgtcttttgtggcttgatagctcttatctttttattgatgaataacattcaatcctatggattattccaatatatttcatcacctactgaaagacatcttggttgctacacataaggatgctatagacgtttgtgtgcagggttttgtatggacacaggttttgagctcatttgggtaaacaccaaggagtatccttggtgagtctcctggtaaaactatgtttagttctgtaagaaactgtcaaactgcaaaacgtggttttgattgccattatcattttgtctcctttttttggaataatgatgtttgagagttaatccaacccaactggtcgtgttatacccacaaaaataaaggcttcagggtagaaggaagggcaggggaaagagaaaggaagaaagtgcatgtgagaacataagcttctcaggattttcagccagtttgtcaagggggagggtttcctgtttttctcctctgtgttacagaccaaacgttgctggtctcatcatcacagacaaattaaagcagctgccagcactgctgggaagtcctaaacccagcaggcagcttctcagttgcagagacaccttttgacaaattcgactcctccagggcctgtttggagggaatgtgtgagctgttcagctcttggggcacagcacataaaccagcaacaagcgtcttctctgcatcgtggttgacatgcatttaaccggtgaatctgaacccacatctgttcatccccataacacatggaacatgctatgattgtcaatgccaaaaacctgaagttccaaaaagcagctcctgagagttcctttcctaaacagtctggggctaaacccaaagcatgtgtcccttggtgagagaggaggagtgggctatactctcagatatggggccataatcttagaaacttccctgcctcccacctccaccctcagccgccaacattaaacaggaataacatcggaaaccaaaggagccacccagacaaaacacaatttataatattttaatcactactgggctagacaaatgtcttccaacacaaacttcccacacatcctccattccttttattttactcccacgaatccataaagttcctccatggagatattgcaaaacctttgtgcaaacgggatatagcttccagctctttgtatgatttcgtgggagctttggtacaaaagagtggtttagtatcttggaaagtctccttccaaagagaaatgggatgacattgcacatttaaggtgtcaatctaagactaatttgcaagtgacaccgctgtacagagtatgtcagtgctagaagcgtaggaacctgggtgggatctgcagctggcttctgctgaagcgaagtgtgtgtaaatttggagaaaaagctcagggactatgcatttcagttctctcttctcttgtgaaggaactgccctaagtgttcctctgaagtgtataataaactgaaaaatttatttacttatttttatcagtagacgtcaaaaagaagcctatcctttatattagagttaaaatttgtacctttctgtacctggaaaaattctcctgatttttaaaacaggtctccataccttttataagccacaacaaggcttctttggaggcaagccactgtctggtggtctcagacagaaagaattcttgcagtaagccaggcaagcagtacatatctaacaacatctattcctcctcttctccctaacttaatttttttttcttttttttttttttttgccaggagcaagtatcaaagtatagagccttcaaaagtgctctggattccattacaaagaaaatcatgaataatgcatccccacctcctgcttttatttaatctcaatcagtgagagctagaagtgcattactgtgtccagctgcatccctggctccggaggctggaacctggggctgagggacccacaagccccacaggtgctgtgcaccgcagagccagttaaccagcaatcctgctcaagccccgggagactgtagcaccaagggctcaacccttccggatgtctggcttgccatggatggttcctatacctagggagctgcagaacctactttgaaactgacacagcctgtgtatcccggggttacatctccctttctctgttttaataaagctgtattcctaataaaaggaacaaacagcctatcccacatgctgaaagatcatgacgagaagtctgcccagtctgttatgattcgatgtcccataagctaagtccctctgcactcgtgcacattgagcacgaaatataggcaaattgttatttctgtccatcaagagcaaattatgatgatagctggcttttgaatgttagaaactatagtgtttttcatttctgggagcacatcttgtgtgtcactatgtgctatgcctttatgttaaataacatgtttatgctgggatacaaaacagtacgatggccacataaaaaagacttcataaggtacatacatatgtcatatatcaacatattttaattagtgtaagttcaacatatagaaaaaacagctactcttggctggatgtggtgactgactcctgtaatcccagcacttcaggaggccaaggcgggtggatcgcttgagcgtaggggttcgagaccagcctgggcaacatgacgaaaccccctctctataaaaacaattagccaggtgtggtggtacacgcttgtagtcccagccactctggaagctgaagagaaaggatcatttaagcccagaaggtcaaggctgcagtgagccaagatcacaccactgcactccagcctgggccccagagtgagaccctgtctcaaaattaaataattaataaataaaataaacaaaaagaaacagctactttttgtaatttggaatcagaagttttatataagataacacttttgaaataatcaggaatgtaaatttatgtaaatttagctgggactctgtgttaacatctttttcgttgtgcctatttttcatgttttgccatgctaacatttgctatgtgcccacacacacacgtgcaattcttttctactctattagcctctggttctgtatgtttccatcattaactgaagcatttgcagaacgaaatggaggtttagcactttgagagttgttttatttttacaaccttggcaaagcaagtgtcattgattaaatgtctgaattccaggagagagaaacttggcagatttttgctaggatgttggactggtcccaaccaaagtagagattgcaagcgatggttcttattttaatgtatgctaatagatatcctgtggcttgtcattgggtctccaagggaaaaacaaaaagagtatgtggtgtattggggagaaggataatagtctctgcgtatagggtggagggaggaggcatcctgaagatgagcaactgcttcattcatttttatctcttagagtaacatgtgcctgtgtcagtccttaataactcttgttccagagtgtccccaaatcattattcacttgtttcactagttttggtgaaaaatgatggatcaaggcttcatcctagcttgagatcatttttggatgcttttgctgttttgacaccggtatgtacagctggatccaaggagataccacccttatatagtttcactgcagcccacacttggttttgattaatttattaacccaagatgcccctggggagaggggggttacgggaaacaccttgaattcttttgttttaacatttcagcattgctattcatagaaactaccaagcctttaaatcccctatctgttcttgccagcaaagtaaaatatgtttttaagtgtttgaaaacaagggagagtaaatgtgttttaaatgtatcacacacacacacacacacacacacacacacacacacacacacacacacttttgcccattattgttcctggtcacttcttacatccagaggctgagaacttagacctgccctctgacctcctaaattatcagaggtgaaactcccttttaagcaagatctatatcttggagagtttcctctccctccttgcattccccaggcccatcttttctacaaagtgctagagtgtcagttttatgggatgttgaaaccttcccagtataaattctacccgcattattcttttcaggaaggctctacaaacatttaataataaaagtgaagtgggtgcgactcttagttaataaatacctcatcttgtgggaaacatgaagccttgagcataaaaccagagctatcttttcatctgggcctgtccatcatcacagtgcccaagtgcttaatttaaactgccacttcgccaaaaacccaactgggcagaggatgcactgttcatgccaaccaccgtaaggccaaattattctatttctagcaacaatcaccttcctcaggaatctataattttcagcttatgataaaccttcaatactttggatttcccgggggaaagtcaatattaaattagaaggtaattatatagcattttgcatacaggctacatttttatagttacataaatgcatactttattcaaagaggtgttaaccatatgtgtcccaattcagtttctaacaaatttcctttcacaaaaaagataagaacttataatggtcacgtaatacagataggttgttttaagaggtatgagaaattaagttgaacatcttctggatatgtgcctgattttgtttgcccaagtcttaccctttgagcagatgatgcaaactatatattagtgacttaggaaataatagtattttattataaaattaataattggtcagaaaggaaacatctgccaatatcattctccttcaatgtccttcaattctgaaaaaataactcagatgacatttttattaatacttaaaaactgatacttaaaaaattcttaaaaaaacataattacagtctgaaatataatagattctcaaagaaaagtacacattctcctttcctcttcatttagcatctgttgttggccaaacaacagatgacgccttgccttcagggtaaaaatctaatttgcatgtaggcgcttgaatgaaattaagctccacaaggtgtgaataacaaggggtggcctgctctagtgacaacaggcagctcttctcaaacaaggacgttgaaagcttgttagtgctaactgaactactttgcagcgtatatccccatctggaggccgacatcaaatttgagagtcacaaagaaacacaaaggtcattgtggcaaaccagggccgtggcattgcacaattctagccagaggccagactcctcaaagtctagatgaatggtgccccctggagctgtgcagtgcacaacgtgtgcatctggataggtcagtcctgaggccagccgactcattttataaggcaagaaactgcagcccaaagaatatatatgcctggttggaagttaagcaatgaggcacatttcaactcaatatgaagaaaacatttttgaaacaggaagctgtcaaagatgatgttggttgactcaggaggtagtgaggaccagttacaggacatttgcaagcctaggctgctctaccatctggtatggactttcagagggggcttgaaattaaggtgtgggtaggggctggcctccatagctgttaaggtttttcccaaccctcaactaaggaatccattgttcaaacacaagtcttcaggctactgagcaccaatcaaggtatggggaccctgaaaggcaatagaaatcaaaagatctattttgagagggctctaacttaacaacaggaggcagcaacatcagtgactttctcagctgctacaaaaagtaaaccatcgtcagacacaattttcccattctcccccctgcacttgcgtcatacccaacttccccttcccctcaacactgcagaacttactgataactaagccatgtctacccctctaggagtagttcaagagtcctggtaaagacctaacaggaagtagaaattacatatgagcagcatgtgtgtgtgcatgtgtatgtgcacatgcatgtgtgtggtatgtatgtacacgtgtgtgtgtgtgcatgcacacactgcatgggtgtatttccttaagcctgctttacaaaatcaaaaagtacttccagcatccatattaaggctgtctccagcactgcatgccattgacatgctgtaagtcacatagaggatgaaaccagggttgggcagtcaagaaggggcatttgtaagggctggtggcatgacggctcccatctgttctctcactttcttcagaagtgaaaaattagccctggatggtgttttatgagatactgaaactagaattcccttaaccgcattcataaaactcaaaaggcagggtagcaattagaaaggtcatggttttttggatcttcagtcctgagttccaatccaacctctgccaccttgtactgtgaaacatcgccgagtccaattaaagtttctgagcatggatttcctcatcgatagaacagagaaaataccttctgctgcacagggttgttgtgagaatgaatgagataacacaaaagaaactgtgcctggtaccttagaaagacacagatgcaggtggtcatatttcaaacccacaattccttcttcctgatgtcaaagcaaacatgagcagaaagagttgtacatgaagaggcatggctctctctttagtaattttcagcttatgataaatctccaatactttggatttcccggggaaaagtccatattaaattagaaggtagttacctggcattctgcataaagcctgcatttttatagttgcataaatgcatactttattcgaagaggtattaaccatatgtgtcccaattcagtttctaaactacattcggtctgtcgtggcactagtccaatagcattcccaggacttgttcatgagccagcttcactcaggcaaggcttttccatgttttggttgccccctttgaacaaagcagtcaacttagttacattattaatgaaaatatctgcacttttccccaaatatcaaactgtgtggttcttctgagatgcacactgaagaaatgaagcaaattcctaggtaattcaagcacaaactgaatggaatcctcaaatttcaggcaaagggaacaccttagcatgaatcacataaagtagaaccttgcaagtgtagacaggcttatggcatcctatgccacctatgtgaagtaggaaatgcaaaaggagacgaaagccatcaccccagagaagcagctcattcacagtacaacgatgaactccaaagccaaatgaaatagcattcctaagcttcccatgacacaagatttcctatcatattcctttgagtaccaatgaggtaaattctccaggagaataaaagatgcaggggtttgtggaatgtgctatccagcagtcccacccaggggcactgggacaggacccacaatggggctgtcaggcaagctctctgtctgtccagaaaacaggacctcggtgagcatggttttggggaatgatgtagatggtataaatatcaaccaagtcacatgacatcactcctcccagatcattctactcctctctcagcaccctggcctgtagagaaagaagaaagagtcgcaggaggaatgagaatgtatgacaactttgaggacaaggaaaaaataccccaaataaatgtatgattgcatgtggccaaaaaagaacaaaaatgttgagaaggttttgtcatgcatggtaggtaggttccattcatttaccagggcaggaaaaatgtaagtctctatgatccccaggaatgctgcttctgaattgagcccctgggaaattttctgaaagtgctccagcacgttgtttctcgatcaacttagtacgcccagtggtggtctctttacctcccccaggagatctacaaagaatagataatagcaatgtttcaccctgcctcgtaccagatgtgtggctgcaggaaatttgcatgatctacctaagtcttagtttttcacgtttgtaaagtgggactgataatacttacttcagggcacagttgttgattgatagagggtgtgggtgggcttggcctccagagtatgtcatatataaatcagtcttcatttaggggatttttttctccaggatcaactttactctgtaattctctttgctgttgtcaccctgccccacccagtccgcccaattctgcaaataatagactttctttttctgactcatgatagaaaacttgagacatacaggaaactatgaagaagaaaacaaaaacctatactcccacaatccaaaggaaacaccagtaaaattttcttaggtatacttccagtctaaaaaaaattttacagctaagctcccattattgatataacttttaggttcttttcttttcctatcattttattatgacagttttctcttgtcactataacttttgtttgtaatgttatctgcggtttttgtgtgtgtgattataaaaatgatatactttgcctggaggtcttcttgtttcatgacaagtaatgaagcacctataattgcccaaacccatgatggccaagaggaagggccagctcccaggataggaacaattataaaatgggacttgggaaaacctttcttggtgaagccacgtggcaagtgttttaagggctacataaatgcaatcagcaaagacgcaccatctgagttcccacaccagctctgagatggggcatgaatatagacctgtgggtcattgagcccttgctacaaaaaaaaaaaaaaaaagagagagagcgagctctggaaaagccatgtagcccactaggaagctgaaatgcctgaagtatagctaaaatgcagtattcctggtgtgcttatggtaggtatggttctgttatacaggaaaaagtataattttaaggaaaagatgaaaggaaagcaaagaacatgatctgcaagggctagaagtcttctgaataaataaggactttagaaacagccaatgggataaaatattcagaatgtagaaaataatagtcatgaccaaattatttcaggataatccctgaaaaaaggatgtattttcaattgtatttttctatacacattttaataaaagttgaatcataaagcttatccaactctactcctgcttttgattttgcatgtgactacaaatttcttactcactccattaaaatgactgcaaaatattccagcaagaggatgtaccagaatttatgtcattgtgtgtatggttgttgcataattataaacatctcagtaataaatatctatgctgacagcttggttttagcttcttgttattatacttccaaggaatagatacctagtaggggaactctgagtgaagagtatcaacttttttataagatttttactatgcaagaccatttacgtttcagaaaaatcatttcaatttccacctcccttagcaatgacagagcaagtctacgtgggcacacccttgctaacaatggcttaaccaggatggatctttgctagtttgatgtacaaaatgccattatggtttaaatttgcattctttttttttttttttttttttttgagacggagtctcgctctgtcccccaggctgtagtgcagtagcgcgatctcggctcactgcaagctccgcctcccgggctcacgccattctcctgcctcagcctcccgagtagctgggactacaggcgcccgccgcgacgcccggctaatgtttttatattttttagtagaaacggggtttcaccgtgttagccaggatggtctcaatctcctgaccttgtgatccgcccgcctcggcctcccaaagtgctgggattacaggcgtgagccaccgcgcccgacctaaatttgcattctttaatgtgatttgattttgattttgatttacttgggatttgcttgagaaacatgttttcccgtttgcttactgctatttgagtttctcctgtgacttgtcttcatagcttgtacctattttgctcctggaatttccatgcctttcttgtgaattggtaggaattctttacataaggatgattgctaaccacaatctatctgttatatttgaagcaaataatttttctagttcatttgcctagtaatgtttatagtatttgtgacactcaaatgtctttgatttttattatctaatagcttttgggtgatttttttctattaacttatgcttagaaaagtctttcctaatctgttcacgagatattcacttctattttcttatgccatttttgaaaatggtttcatggagtgttttgagaaacacttttgagtttaagaatttcagaaaccagaatttccattagccacaaaagcagtgttggagaagtgtgactgttgctgcctggatttcagaactatgagactgtcattcattggttgatctttatagcacatgtgctcagatagtaccatccaaggttggtcagggagggcttagaactggttctggtgactacatcatcctctgttcaaataataatcattttcccttcttgaactggaaacatggaaaatttgtattttcagtatccatccatctctacctcttccacatctcccccactttcctgtatttctattaacttctctttcacattgctttatatattctctattttgtatctatctaccttccctattgacccatctatctatctatctcttacctatctacttaccatcttccactgatatctaattctttaatgtctatgagccaatattctatatttatctttccattcatctatatctatttcattatttcatctctatatttccacaataatctaaaaaggtgtctagaactttttattatcattcagatttctacagtgttgattctgtactttatctaaagtgggttttaatccaacgtttgcaacttctagtttccttgcaaatccgctgcattttccccacctctcacttcatattggcctgcatcttaaccagatattcctttccattttagtctgttacgttctcacttcacttttaaattttatgttatgaaattcatattgtcatatcttatattgagaacacaaaacagatgctttgtaaagttttcctgctggtgataaaatgttttactttaatatgctttatttctgtgctatgtgttgaactatgcccccctcccacccaattcatgtgttgaaatcctactgtcctaatgtaactcacaatgtgaccttttttggagacagagctgcagatacagttagttaagatgagatcacattggaatcagagggatccctaatccagtatgaccagtgtccttataaaaaggggaaattggaacacagacacacaaacacggagaatgtcagttgaagatggctgccacaagccaaggaacttccagaaatggcccttctctagatccttccaagggcacatggccctgctgacacctcaatctcagacttctaacacctcctgaagccctggatgtttctggactacatccaactacaaggcaataaatatgtctgttatttaagccactcagtttgtggtactttgttaaggcagtcctagcaatataccctgtgtcatcttttatgttttgaaatttatgtacctggtgttttacttggttggtgctcattattgaccgtcatggttctgtcccaggtagcagtgattgtgtcagtaaactaggctagattttgttattgctgttgttgttttactgtctactaggtataaggaatgtcccctctctgatctaaagacaaggatgaactgatgtccatgtctcctgctccacactcacatccagcatccagcagtcacttgatctgttatggctatgcttcattgagaacattcttcgcctctaccctggggcctgatgacctgaaaatgccgatattcttaaatattttggttcaatgtgttgttattccctttctaatgcaatacatgaacattacaaccttcagaataggtggcttccaagatgttttccttcccagaccatttgttttcccaacttcacccctccctatacaactcacaccacttttcatttctgcgccaggctggatgcattcccaggacctgcagtctcattaaaatttggagatgtttggaagggtatgtctctctgggtgtgacataactaactgttcagaatatctcaaaatgcaacagtcagttaggatgcattggtacctcctttgtcccatgaaggccctgagaccctgcaggaggtagagccgtgatagcaggtgcagtctctcacctccatttctttataggcatgtgaatattcctccttaggtctggcaaccattcatacatagtcctactttttagtcttgttgacatcctctttgcacaactttttggattttaataagtactttaatgtcgcaggaggaaagtacagaaggcctgccatcaactcagagaagaaaaatgctgtttgtcagagatatagaccaatggaacagaacagagccctcagaaataatgccacatatctacaactatctgatctttgacaaacctgacaaaaacaagaaatgggggagattccttatttaataaatggtgctgggaaaactggctagccatatgtagaaagctgaaactggatcccttccttacatcttatactaaaattaattcaagatggattaaagatttaaatgttagacctaaaaccataaaaaccctagaagaaaacctaggcaataccattcaggacataggcatgggcaaggacttcatgtctaaaacaccaaaagcaagggcaacaaaagccaaaattgacaaatgggatctaattaaactaaagagcttctgcacagcaaaagaaaccaccatcagagtgaacaggcaacctacagaatgggagaaaatttttgcaatctactcatctgacaaagggctaatatccagaatctacaaagaactcaaacaaatttacaagaaaaaaacaaccccatcaaaaagtgggtaaaggatatgaacagacacttctcaaaagaagacatttatgcagccaaaagacacatgaaaaaatgttcatcactggccatcagagaaatgcaaatcaaaaccacaatgagataccatctcacaccagttagaatggcgatcattaaaaagtcaggaaacaacaagtgctggagaggagatggagaaataggaatgcttttacactgttggtgggactgtaaactagttcaaccattgtggaagtcagtgtggtgattcctcaggatctagaactagaaataccatttgacccagccatcccattactggatatatacccaaaggattataaatcatgctgctataaagacacatgcacacgtatgtttattgcggcactattcacaatagcaaagacttggaaccaacccaaatgtccaaaacgatagactggattaagaaaatgtggcacatatacaccatggaatactatgcagcccgagttcatgtcctttgtagggacatggatgaagctggaaaccatcattctcagcaaactttcgcaaggacaaaaaaccaaacaccgcatgtcctcactcataggtgggaattgaacagtgagaacacacggacacaggaaggggaacatcacacaccagggcctgttgtggggtggggggagtggggagggatagcattaggagatatgcctgatgttaaatgacgagttaatgggtacagcacaccaacatggcacatgtatatatatgtaacaaacctgcacgttgtgcacatgtaccctaaaacttaaagtataataaaaaaaaaagaaaaatgccatttgtaaaagctgcatcacattccaccacacagacataccctgtgatttttatttattcccctattgctacacttcactttctttatatattttctctacaaagaacatcgctacaaacaaagtcttgcccacactgcagagtatgtcctgagaacagatttctaactttgtaattagtgagaaaaagacatgattgcttttttttttctttttgagatggagttttactctttttgcccaggctgcagtgcaatgatgcgatctcagctcactgcaacctcctccttccgggttcaagcgattctcttgcttcagcctcccgagtagctaggattacaggcacatgccagcacacccagccagttttgtatttttagtagagatgggatttcaccatgttggccaggctagtctcaaactcctgacctcaggtgatcctcccacctcaacttcccaaagtgctgggattacaggtgtgagccaccgcacctggacaggattcttaaaatatactggcaaagtgtttttgagacatccttcccagttaaagttcttaccaacagtttgtcaaagtgcccatttcacttgatttttgataacatgattgaattttttttctgatcatattatatttgaaaaataacatttaaagagacgaatatgtgggagtgggtataagaaagatcgaagggtgcagactctgtgccttccagaagtttatatcccatttggaggaaacgttggtactgcagatgccttgaagaagccaaagtaagaagacaaaggctgaccttcagaggtggctaggcaggacctctctgggaatataacatctgagcccaggccggagtggggagccttatctcagggaagaacttcttcagcaggggaagcaccaatgccaaagcctaaggccagtacgagttggtgagcctgagataaagaatgcctgtgaggccccagtgcagggagcagacgcacagggacttgtggagagcttagattttaattacaaggagccacgttgggagaattttgtttaacagagggataaggcgaggactaaaggagattccatttataaaaataagcctacttatgaaggagaaaatagacagtgaggactaaaggagattccatttataaaaataagcctacttatgaaggagaaaatagacagtcagggcacgaatggagcccgggagcctgctgggaggttgcaacacagtccagaaaagtgatgaaggtgtaggattgactcattaagatgcggagaagttgtcagatgcaggatacattttggaagtaattgatggaaactggcttataggaaacagaggctgaggttactgacctccgccactgatgggaaagactgaatggggccaggaacattaatatttctattgcagcaatggaataaatggggacccatgctgaaaatgtagatgtaagagtcatctctataatctggaatcttagcagaggaagcagaatctcaaggagggcagagaaaatggctttgcccagagcccctcacacagcatgggcagataaaatacagaaaaatccattaaatttgaatgaatcaaccaggtataatttcttagaataagtatttctcgtgcaatatttggaacatacttatgttaaaaaattattgtttatctgaaattaaaatttgaccggaggccctgtgtttttatttgctgtatctggaatccctgcgtgggacattccaataatcctggtggaggaggatttggttaagaagaatcaaatggagcatttgtataactggaagaaaaacaggtgcaatgaatggttagttttatttgtcaacttggctgggccacagtgtccagatatttggtcaaacattattctggatgtttctgtgagggtgttttcggatgaaaattaacatttgaatcaatagacttcgaataaaactaattgctttccctaaggtgggtgggcctcatttaatcagttgaaagtctgaatagaacaaagactgatctcccctgggcaggaaggaattctgcagctgagacctctggactttgaactgtagcatcagctcttctctgggtctccagcctgccagcccaccctgaagatcttggacttaccagcctctacaatcacatgaggcaattcattaaaaatctccctctctttctctctgtttctctctctctctaccacacacacacacacacacacacacacacacacatcctgttgattctgcttctctggagaacactgacaaatacaccaggagtgtgaggtgtcccaggaaggcagaagtcaaagagctttggggcaagggagaactgacttggcaaatatagtccactggtgagcttaacctaacttgtggcatcttatcattttatttatatttatttaatcaggtgtgggattccctactttttcttaatgattacccatttctaagttctttataactacagccttgaagcatggagtagggcctttcttttctgacatgaatatcagcgatttacttttggcggatgcttttggtggcccacgtggcaaataaatataattccaggtggtggtaagtgctgtgataaaaggcaaaatagcagaaaagggagaagctggagctgctgttgtcaacacggtggtcagtgaggagaggacatcagagcagagacctgaataaagtcgggggaagagtgaagccagtatctggggggagatcattgcagacataggaaacagcccgtgcagaggccctgggtgggaacacgcagtggttggtctccccactgggcacaggcagcaaactgctatcagagaacttgggagtcagagttgggtacgttcttgtcccaaccctgccattcaccagctgcttcacgtggaacaatttccttctcttctttcagtgtcagcttcttgatcggagaagcaaatcaggtggataagtaattccttatggtcctggttatccttcacatttaaaggcagagaagtgttgtcgtcattttctttccagcagagtgttattttcagtgactgcagttttgcatttcctatatctgcctattttgagttcacattctaacgtgtgtagaaatcttttgtttagagatttaacattggaaggcatctttggagtgatggagcgtgtttcatctgtgatgaatgaaaaagcttcctgtcctcctatcttgctggagttgtgttttcacacatcctgtgaagggcaagacccagtgggacactgttttcccagagaaatgattagactacaagaaaaaaccagagccatataatttatggcaccatgttaacagcgagcatagtcaacacgcaaagccgactccgccagataaggagttgctttggaaactggccctgcgcaaatcacagacgtagcagtggcacatggatggggaccacattctcttgtgtcattaactaataaagagctcgcagaggaaaagcaaatatcccagttctttttaatgactgctactcaaaataaaagaatacttttgttttgttctattgttgaatttgctagaatactgcaaattctgttgaatttgctagaatactttttatttcaccaagcctaaaaaataaggaaaattggcaccaaaggaagtttctcacaaacttatctttttcaggacaaagaagtaattcaatcagatggagaacaatatgcaaattcttaataagtgaaaaagatcattcataccctgggcccagcaggacagacagaggtacagatgggagcagtctcccttttctctgagctaaaaggcctgaagttatctgcatccaaaacctgggtattatggctaagggaaggaaatgaccttttcaggtttcctccagtctgtttgcaggcctatggtaaagaccagggtgggctggtggattctcaggcaagctccccctgaaactgtggggaggtgattaaaggattaaaatttgcatgcaaagcaatagatattcaaacccttcctacccgccccccaccctcaatgtaacagagaagataaaagctgtttcctttcaaagcttcaggttaaagatggaagaattagccaatatgtaattgtatagcggggcactcagaaagggctgagaggagagaaggcaatgatatccaaatagcaatctgtgcttagaaaaaaaattaacctctgaaaagggagaaatgtcattgtctaaggtggttctctaaatgggggtggggggagagtgatgattcttacgccttcccagaggacacctggcaacagtacaactgggggtgggaggtaggggtgctactggcctctagtgggtacaaggtagaggggatgttaatgcataaggcagcctcccgcagcaaagaatgagccagccccagttggcagacattgagatggagagactgagaaaggttgagaagctgtggtctacggagaaaccctggtctaaggacctattctggtatttattcagtctatctgctcaggatgtttcccggcccatcttgactattcccaaggaacctcaacccaactcttaaagtgaagccccagggtttgccttgttcagccttagtgcctggaacctctcggcctatgaaagccttatacccggggaagcgattggagagaggaatccctgtccagggctaattgattcccccaagaactgtgtatctgctctctttgcggtcaaggagagaggatttatgagacacattaaaacctatctatgtctttctttgtaaataaactgtttagagttctcagatttcgatctaaatagttacaaactttatcaggctttgctgtagtgttgttcaaaataagatcctgcaattatcactcaattgctgccttggaactgagacaggcaggcgccgtgggcacggcccaggacggcacactgcttggagatacaggtcagggagatgcttccactccatgtttccaagagagcacaggacattctttgtaacgcacgtctgtgtgtcctgggagggtggatgaggagccatctgaactgtctgcttcaaatttataagagcctttttgaaaaggagattgtcaggggcttgcagccctggtactgcctctgtcagctgcagggaagacaacagactgttcacacctgtgtgctccgggaaccaggggatgacatgccaccacttgctcaacttgggatgactggtacgagggagtctataaaaagacttggtcttctaattactttaattcatttttttaaaagcatagctgtacttcaatttagcaaccatattcctaaaaatgttaggccatacaagcaaacatttttgtccttttttccatgatcactcccataaaaaaaaaaaaaacaccttttgggcatttttctgattgcttctccacctccttgaaattttgatatgttacactgtgtatctggttatgtataatggtccttaggaaggccacacaccttcacagtagctaggatctcaccttgggggccataccagtctctttgagcatggctgtgctacactgcatctgcccatttgatttgacattgacagtagccactatcaaaaagtattcaagaaaccaggcacggtggctcatgcctgtaatcccaacactttgggaagccaaggtggggtggatcccctgaggtcaagagttcgtgaccagcctggccaacatggtaaaaccccatccctactaaaaatacaaaattagcagggtgtcgtggcacatgcctgtaatcccagctactcaggaggctgaggcaggagaattgcttgaacccgggaggtggaggttgcagtgagccaagatcgcaccattgcactccagcctgggcgatgagagcgaaactcagtttcaaaaacaaacaaaaaaacaaagaagcattcaagagcctgaaatttttttttcagtgatttttaagtctatttttaatggctctttgtaggaacaatggcaagaagattaaaattatctgctagataatcaattaatgtctgcagacatttgtagccttttctatgaatggacttatttatgaaactgatttatacaacatccattgtttaagcttactttttatgtatgcttggaacaatttttcatgtaattacataaattttggacatcctttttatagatgtgtaatatgccatgctaagtatgtaggttatcagatttaaagaactagttttgttggctatttaggctaattctgatgtgtctctattagaaaatgctgcagagaacagatgcagctcatcttcatgattttttggatgcattcatattgtaagatgctaggaattcttttgccttttaattaaaatgtaccagcacttaaatgatccattataagtaaaaaatctcccaatagattaaataaagcaaaatagtaacagatctttgcatgtctatgtctgtctgtgtgcaacttagactttaatttgttatttagcttaaggcaatgtgttcctaaatgctactctaagaacttgtacttaccaccccttccaccaaacacagacaccttccagaggacccttgccctccaatgagatctctattgtcttatattaatttaaccctgctgttctaggtatatcagaagtcccatagagtaggcctgttttaatttcccaagggaccacataaaacattgtacctggtgtgctcaagttcagtgaattactatcaggacttcttggagtcttctttcccctaagatgccccagtttccatgttgttggcacatggccaggtgcagtatcccctccaaacctatgactggatcactgattggaattctccctggggggctgccccttccttcacattctcagctccatgccccgccaccccctcctcaagtaaacagctcttgagatttgacccaggaaaagtcaagtccaacagaaactcccagaacattataccccggccccatttgttttgaaaatagtatcgaagcttacaattgcaaacatacaagtgcttaattattgctcagtatccattttatttctagatattcattgaattccattcaaatgtcgatattagcaatattaaaaatagatggctgcaatttttctactgattatataaagacagacactttaggtaatggtcacatatgatgtgattaaattgttttgctgtcattgtgttaattatgtgccaaagttaaacatattcatctgcaaattcaaatctgcctggatattaccagtaattatggcagtagcagtcaaataagtgtcctcatgtggtcgagagagtgtttgaggctatggtaaatatcataaaaatatcatagtctatcatgtgtttgaaatactatcctctgataaatgactactttttaatacctgtttgttttcctgtgtatgaggcaaatggaaaggaaaatactttttgaatgagcttgttcattgacttcagaaatggtggaaacctttgcagtgtctgcatccccctgctctgtactcagcatggggcagccaccgaaggctcccagcccctcacccagagatactggaagtaccacaaaagttgagaagcagctggtgtttggcaggtgaggcagaggatattattgttattgattattgtatcctgattattatccttcatgccatcttcctggtaaggaggcccttagacaggtaagagcccataagagtagtcaattttgatcttcgtgttcatctctgtgattttctttcttaatctataaaaaatatctttgttgaagaagcggttatgtaccaaatgtttgtgtccccccaaaattcacatgttgaagcactaaccctcaaagtgactgtactaggagaaagggcccttacagaggtaattaaggttaagtggactcataagggcagggcttgatccaataggatcagtgtccttataagaagagacaggagagtgctcaagcactctcttcaccatgtgaggacatagcaggaaggcagcagtccacaagccaggaagagagccctgaccaggaaccaaattggctagcaccttgatcttggacttccagccttcagacctgggagaaaataagtttcagtcatttaagtgagccagtctatggtattatgttgtcgcagcccaagctgatgaatacagaaggaaatgaaaataatggggattctggcttagctttggcacctggattgtctgtcacctgtagatctattgagcatccagctaaacattttgaacctccctgggtacctgagtctgtgaccagtgttggagactcaaagatctgtaagacacagttctcatcgttgataacctacaggtcacatttgacaggcttccatcagggaggtcttgtgattcatggccacatcctgtccccaagtaaagaaccttactgtgagttcctcaaattgttgatgtactgattaatgcacgacctactgacattgaaaaggacactgatttgtttctgaatcatgaagttttgctgatttgtctctgaatcataaagttttattgattgtcttacatgtccacattttagcctgtatgttgcaagctgaagcaatgattaaaacctctgtattgcaccttaaccaaaaggataactctatagaaggagtggctcccttccttctcaacattcctctaaaagccttcctacctgtaacagaccctagaacatgctggactttgtcagtgtgtcttccctggtccatcctcacacttgatttccaataaacctgtggggtcctgataagagtaagattaagattaagattaagataagatgaatctcatttgggagagagccccaggtggggaagaacaataagccattgttctgagagccagccaatcacagacaacctacagacatacaatgaccttattccacctatagtcccctccagctctgctgacacctcgatcttggaagaaccacctaccaacatgggtgaaggcagaggacaggaccttcctttggggcaattgctctggtgcctctgttcaggggaggtgtcacattctaaatagctgagcatgggcaggaagcacgtcaagagtgcccaggtaaaggacaagtgtctagatctaaggacacagtttcccaatgagcttatatcccaggacatcggttttgaatccaaaactgggactcagggtgtgggagacattagggagaaaattagacttttgagagtaatgcccgggaacacccaatgagtagctgagccagaaagctgcagatttgtatggatatcaccaaacatcaagcaaaaggcttttcctctctgaagaccaaaatgaccaatcatagtgatcagccttgaaaacaaattagaaaaggctgtgcttgggaagctgggaggtacgatgatattttagtgccttaaatgtgagtcagggtagagacaagattctctgagttgagtctatgttattcctctgaggcttgttgaccaagggaaagttagaaagttatatatgtgtgtgtgtgtgtgtgtgtgtgtgtgtgtgtgttttaaagttttgctacaactggactacagtccagaggggagatatatatatataatatataatatattatatatatcacactatatacaggacagatgatatatagaagatatattatatacacacacacacacacacacacacactgggggtgtgtgtgtgtatgtgtgtgtatatgttttaaagttttgctacaactggactacagtccagaggggagatatatagatatagatatatatatacacacacacacacacacacacacaaaacatatatctatacacatacatataacatatatatatattatgtatataaagtggtgcaatggactatatgtttatgtcttcccaaaattcatacattgccacggagaggggcttctgggaaaccagtcctactaaaccctaaggtaatagtattaggaggtgggacctctgggaggtgattaggtcatgagggaggagacttcaagaatggtattgctgcttttataaaagggatcccagagagattgtttgccccttctaccctgtgggggcacagggagaaaacagccatctcttaggactgggccctcagcagacactaaatctgccagtgccttgatcttggacttcccatcctccaaaactgagagaaataaatttcttttgtgtgaaagccgcccagtctatggtattttcattagagcaacccaaacaggactgagagaagtagtattgctggaacaggggaaacaataatggtaaaatatacagggtggaggggccctggtctttagagacatcatcttctttcttatccttgggcagaagcagcaggaaactaacaagaacttccagcagcaggtgcatggtgagctcatcactattgcagtcacatcaggctgccattcaggataccaaagatggggcagcttacacaccaggcatgactttctcagttttggaggctgtaagtcaaaaatcaaggtggcagccaattctgttcctggtgagagtcctcttgctggtttgcagatgactggctactctctgaatccttacataaggaagagagcaatcatctctctcctgtgtcttctcctaagagtgctaatcccattcatgagggctccacccgcatgacctatcacccccaaaaccccatctccaaataccatcactttagggattaggacttcaacagagaaattcagggaggggaccacaaacactcagtgcacatcagtaactcacaacttctctcgtagttccctgtggatgtgtggaagaatgggtatctgtcaaaagttagacacaccaggggaaaggaaagcctggtgattctatagaaccttccttgtactcccgtctccaattcaggatccaatggcaggagaatgggcaacaaaatgccctgagaagctcatgaggtcagcacagaagatgccatgagtctcctgtgatgttgggaaaggaatctctctcagtggacactgtggggagggaaggagggtctgggaaacaatgcctctcttgcctttttaaatctaagaattgcacattcagaggggagtgggagtacagtcatgtcatcatctccacatttcatttgataaaggatagacggttttgagtcatagacctttaaatatgcatggggtgggggtggcattagatgaaccctagtctcaagttgctgggtgagatgaagtcaaacagtatcaaaccctttcattctcctaaaaatgagccaagaccatgagctgtaggtaggcatttgctccaaaatgatatattgcagttttgcaactttcctttctgtggctgctgctgtccaaaatgccacttccctcttaagttcttctatgcacagttagaaagataaaatgctaagcagttgaaaagggttgaaaaagaaagatgtaggtttaggtccggagcctggcgcacccgccctaatttgagtcagggaccctaggcgcctgcagctccggttcgggttgagtgcctcctgtcaggatgtgaagctgctgtcccccccgggggcctccagcactgctgaggactcagcagtcagcctctcctcccacttgggctcatttacagagagcatctccaggaatcagtcatggggaaaggggaaacgcggagtgacaacacaacacgtagaaagttctctgccgccttggtcaggcttgtcagcctcacagcccatcctgctcctgcgggaggaaaagtgagcagaactcagcccggagatgagccgcaggccggcagcccctgcctctgccctgcttgttgtgactgcaatgcaaggctctctgtaggtgcgggggattcgggttaaatgggtctccagtggtccagcgctcccagcaaaggccgaccacaagaattagcgggctagttatttaccataaccatatacaaaaccacaagcatcagcgttccctcaaatacatccgagacgctgtatatctctttattaaagcctgtcagggtttgttattgcacagcttggccttgaaccccaactaaaccaggctgcttgagcaaagaaccaagcaatgcaagcattcaggcaggaccattataaccctgaggccaaaggcagaagcagggagaggagacgtcttcctctcctgcctctctcctttcactttcacttcgaattgatttttaactacattcgagctcacgatgatagatggctgtaaaatattttaatcattcataaataaagtatttatcttgtgtgagttatccggtctccttcactttaatgaacacagtatacatcacgctaatccattactatcaatcataggtttcaaggtaggcaatgtaaaaacttagaattgttgtcatcccttctaggcctttggactaagatcaggtttggttgctattcttatctgtttgcttagttttactttgcctcgttctcagacctatttttttcaaagccatgatgtatgcattctagcacattgatgtcattttgagttcaaatgccccactggttaagaaaacagcacaatgtggaattttcagctttcaaaaaggtctttgctacaagacaactcagataaagaatttagcaatagccaagatagagtggtggtgattaagtgatgtaatcaaaggattgcaattcccattctaaataactctctaacttcaaatttgactatggggtgaccaacctatcggggtgtatgttgaactttcctggtttgagcactgaaatttgcatgtcctgagaactccgagtcccaggcaagccagcctggctagtcacctaactatgataaattcagtcttcggcataagtacatactgttaaaacttcatgtgttaagacacaagaaggcaaccatcaatctatggtgtgaactagatggagaagctccccactggtggaacacaggacagtctgtacaaagggcaaactcttgctagttgacttctcctgcctgtcaccaccacctctagattttgagtagttggaagtggtctctgcaggtacttctgaagctacaggaatctctgggccacgggtgtcttcttcagggctttttcctcccctggtagcattcataggctttttcaaacacaggtcttccctttaaaggactagcaagatgaaaagagcaaggctgcccttaggtatagctgcaaactccacagagaagaggacaactctgttctgtcaccaccgccacctgtcctgctttggctaaagctaatgatgactggggaaggaaaggttccctatcttgtggccctggagcagccctgggaccatctctttgcctcttaggtccacaaagcctcctgaatttagtacaatgctggcccctggggtccccctttgaagagcaggatagttgaactttgtagaatgtaaattacacatacagtacaacctcctggaaaaacacagcgtctgaatgccctttgacctcctggatcatgattcctttgtcccctacataaggaaaacagaaaatatgttctataaatagtttctctttcacctttttagaaaaaaagttgaaaaactaaagggaaagaaagaagaggaaaaagaaagtttatcaatacctgtataactgaggaaaccgtttcctgtttctattgtatattgaaaaaccaacttacgaatcacccttgcttgctaaatgatttacaaaggtcagtaatgaggaactccgagacgcaacctcagtttcacttggcagctttatgtggacatcctcacatttggaaacaagaagtgaatttcatctctacaccccttaaaacatccatcaggttaaaataaggagcagtcaatgtaaatgtttaacaaccagttctcggtgggaagggcagaggggaagctctggtttgtagggtccgtggattcccatgatgtaagtactcccaccatgctgagttcaagttaccaaggtgatgtcactgaaccagagttgggaaaacgttctctagggctgggtaagtgaagggtaggcaggtgtcttcagcacaagaggagaaacagaaggaaaactggctagaacagtggttctcaaccctggctgcatatcagcatcaactgctgggcttaaaaaaagtgcccaggccacactccaaccaacgaagttggactttctatgggtaggacccagggattcctgtgattgaaactcctgaggcaattctaatgtgcagctgagactgagaaccactgctctttcacggagcttgagtagtattcccttttgcagaaatgcctcaaatacttctgagacattgtatacctctttacaatagcttgtcagggattcgcagtttagaaactgcaaaaccgtgagtaggatggcaatcattcttgagtgacaccttttggcagggctatgcttgccatggtcatacaaccatgggggatgaaatgaggacccagttgaaagaacgtgataaccccaacatgcacaaagtgctctgaggcctctcagctaagagatggctgtacttttcagcctgctttgattgcaatacaatctgtaggtgtggtgatttgggtaattagatatccagttatatgcaatatattctgttttccttttcatttaggctaagacattgatatgagtgactatttacctgaagcaagtaaagatattggtatatattatgaatgtagaaaaggtgaaaaatgctagaaatagcacaaaaactagagaaatgtcatgatataactcttaatgaagtttctgacacgtgtctatggtgtgtttaataactgtgtatgctgtatgttaagtatggagagaaccctatcaagattgagagaactcttgttttggttaggcactggggagaaatgaatctaccacttctgcgtttttaagaaaatgtcctaatcctaacacttcgggagtccaaagtgggcagatctcttgagtccaggagttcaagatcagcctgagtaacatagcaagacattgtctctacaaaaatttagccgggcatgctggcacatgcctgtagtcccagctactgtagaggctgaggcagggggatcgcttgtgcccaggaatttgaagctacagtgagctgtgattgtatcactgctttagcctgggtgacagaatgagacctggtctccaaaagaaaaggaaacaaaagaagaggaaagaaaagagaagagaagaaagaaaagaaaatgtttttgttgaagtacatgcacacatagaacagtgcaaaaatcataagtttatatctcagcaaattttctcaaagtgaatatatctatgtaacccccatgccagatcagaagatggacatcccagtacaccaggaccttcacttggccccacctggcactggtcttctctccttcatgtaaccactatcctgatgggtgaccacacatcagctcccctggtctttgaacttcatagaaatagaatcatccagaatgtacccttttgtattgggcttcttttactcaacattatttgtgagctttgtcaatgatgtgacttgtagcagtaattcattcattctcatttttggatagtattccattgcatggattatgccccaattcatttatacattctgctattgatctaagttttgacacttacaaatacttctcctatgaacattcttgtacatgtcctttggtgcatatgagtttataatgtgtctttgttttaaatttctgtccaataaaactctgtccagtgtctggtgaagctgaagttcacatagcacttcaggttatgaccaaattgccactgatgacctgtttttaatggtcttacaggcaaggttgttatattttcaaagccaaaaggtgaaaacgtgaaaaactgcctgaatacttagcccctagcatgggataaagaacatctgaaaggaagtcagaaagtctgagtaatttgaaaaagtgcaaaaagagaccatgtaatccatccaaggtgatatggtttggctgtgcctccacccaaacctcatcttgaattgtagttcccataatccccacgtgtcatgggagagacctggagggatgtaattgaatcctgggggtggttaccctcttgccgttcttatgatagtgagttctcatgagatctgatggctttataagggacttttccccctttgctcggcactactctgtcttgccaccatgtgaagaaggacatgtttgctttctcttccaccatgattgtaagtttcctaaggactccccagccatgtggaactgtgagtcaattaaacccctttcctttataaattacccagttttgggtatttcttcatagcagtatgagaacaaactaatacaagagggtattatgtttgaaaggagccttagagaggaatggttctcttttttactgggtgaggaaactgaggcccagggagatgaaataactcattcaagatcacataggtagaaagcagctgaactgtgccagggatcttttcaactcctagttggctacttctataaaattaaactgtctacacttttagagctagactgatgaattttagaacgtgccagtgtaagtcaaaatgtgaaagaggagaacttgtttcaaacaccttaaactgaatttctaccccaaaaagaattcataaacacaactctctgtctcttgatttcctctgtcctcactcaagctgcttcccagtgatacccaaaatccaaaatccaccatggcctcctccaatttgttctccaagtggacagcatggcctttgcatatgtaaatctgatccctttatgcccttctaacacttgtattgttcttaggataaaggtccaaatcttcagggtgccctaaaaggacccggagagtctcattctttccatttctctcctcctttggaatgctggaatgctggaatgctctcctcctgtgctatgcctcctttgactacacctccaacaaaccctgccccatgaagccttctttcccttagaagctggtttaattatcacttccttgggaatcttccctaagttcctgacttggtccatgtccctattacaccaggcacctactcttggctgcatccgttgtagctgtaatactacatttacttatctggtctgtccttcaatttgtgttggtctcccttcttagactccatgaaggtagggtcacatctgtttttgctcatgatacctgatcctcaacaaatatctgtttggtgaactaatatctgaatgattgttttctagtactttctgtttcatcatttgtatttgtagaccatcaaaaacaagtctgatacgtttatcagaattttacaaatttaccactatttacttaaatatcaataactatcaatttagatgaagaaatggaagataggctaatcacattttcaggtaacaaaaagttggaagggacaactgggtagaagaatcaagattgtaaaagtttagaatgacaaagtaaatttgagcaatcttacagcatgcacaggacaaaatagcatgtccatttttgaagttccagaggtgaataagcatggttcctgaattgaacaagctcatatctgatggaaatataaaatgtgagcatgaccttacaacaacacttcacatgcttccatctggtgtgaaattataaggtctctaaattagcactttttccccagggttaggcccgattatatggaactaccagacgtaagacagcatatgatgagttcagcttcattcttgctattgaagaaataatttttcaactgctatgaggttttcaaaaacttttaaatgtgatttggtgaaattttttaatctcaccagaagagtatctggacatttttctcagtcaaatatgacttcatcaaaaatatcacgtacatacatttaaaacgtctatgacacagctatcattctgagtgcacttctccctgcaactacacctggaagtctcaggggttcttacctacagtaacctagggcataacctggctggtcctcacgcctggcagtcaccaagatcctatctagttatctcttagtagatttctccaaaattggtgccagctaccaacttatacacaccccagtccatatacctctaggccaccattaattgtactgaattgtcaccttgattcatgaaaatacaaaacaaaaaagtaattttttaaaacagattacagacacaaactctgatgtaagtagtaataatgtaatacctggctgaaatgctgcctttgtccacgcatggatttaattaatatagtctctcccctctagggtggacagaaatatccagagctgtgctatgaattacgtacatggaagttgttatagcctatgtttgagaaccccactccatcatcaaaaagaaagaaaaaaaaaaaaagagacccactctccattacagagggaattgcatagataaccctggccaggattcacggagagataattttatttatgctggtttcttctttccctcctttagctattccccattgacttggatataactaacttcctttcctccatatcccacaatttggataaaataggcaaatccagctttgaaaagaaattgacactagaaatcaaattcaaacaggaaattctatgatcaacttatttaaagtattaaaaattatgttccaattttcaatatatggtctccccagataaagttgaaggaatgagatttggtcccattagattgacaaaacggaaattatgtttggtgatatgatttggctgtgtccccatccaaatctcatcttgaattgtggtttccatatgtcatgggagggagctggtgggatgtaattgaatcatggcagccatttcccccatgttattattgtgatagtaatttctcatgatctgatggctttataaggggcctccccagttgctcagttctcattcttctctctcctgctgccatgtgaagaaggacatgtttgcttcccctttcaccatgattgtacgcttcctgaggcctccccagcattgttgaactgtgagtcaattaaacctctttccttaataaattacccagtcttgtgtctttattagcagcatgagaacaaactaatacatctggtaaatgttttaggagcagacaatagcctcttaaatatctctgaaaatactagaaagtataagggaaaccaaaccaaaaactgtgctgtagaaatgtcttgcggctcttattgcttaaaaaaatacagagcattcattattcagatttgtgtccgttctattttaatgctatccaattagatgttcctcctgacaggagttggttccatctaataaattcattaaattatgtcaacacttatatgacaagacttgcaaaatcttgttcagtactcccattacacctcgtcagccctcatgtagaaaagaggacatcaacaaaaattgaaagccaaaaatcttcctcataagaaaaagaagttaacgtttgaaaagtcagaaagattaatattttctcctcttttgtggatagtctcatacccttggggcctcattttcaaactggctaaaaatgaaaggatgaaagagtccacaaatgcatagcataattagtgtggatttactgcaatgagacattacaacttacagagaccctctctctacaaaaaaaaaaaaaaaaaaaaattagccagtatggtggcatatgcttgcagtcccagttactggggaggctgagggggaggctgaggtgggaggatcgcttgagcccaggaggtcgaggctgcagtgagctgtgatcatgccaccgccctgtagcctgggtgacagagtgacaccatgtctcaacaaaaagaaattataacagagaaggcacaaagccttcatgctagaccaaagaagaaaaggaaacttttacgtcattgtcacctcctaatacagaagtcctagatgaggcctgaccttgctctttaatgccctccttgggggtctggtgacagtcagcagccagatgccatccaagaagggcttagccctttatatctgtttacctccacaaaggacctacacacacaagtatttgcgaatgatgctgtcttccaaagcctcctgtgctgtatgttgctctacttgcttgatctcaggtagattcagaacaaaaactgagagttgattcttgaccagacggagggttattctgcaggaattaggaagaccctgttgcaacatttaaatgtctaggtgatagaagatacacaaacagatcagaacgtaaaaatgcacgtggactgtgtatttggtgatcatcaccacataaactatgtgcacatattaagtagaaggagaaagcaattctggagtgctgggctaaagagtgttccctttccttttttcccccaaattttattttctaaaatgatatcggttttcttaaatatgaaagagaaggcaagcttcccttccttgacagcttttacttagaccagcgctgtacaatatatatttttcattattgtatctctaaggagcctttttagacatttttaaaaaacaaatctccctcctttttgaaaattcaatgctacatattcactgtgtactgtatgcatatctgtggtttaggcataaaaatagtttttgctccctcccaccaagcactgtttttgtcctcttgagagtctagaatttgagtccagatgggcatctgagacatgagtacatgtaacaaagtaaggtagtcttacctttgttcattgcctggaatagacaactagatattggttttagctggaggcagtaacaagtgcgctaagattaggggattgctgctgatttgaatgatcttccagggacccaatccgtgtggaattaacccgaaagtttagaccctttctgatccctctgatgagggtcaagaggcccatggtcagcctgaacacctctgatactgcccttgaggcagtcccaattcccagtcaccccctgaatgagcattcatgttcactgatgagtgttttcccagagaaaacagcccagaatccaccttcaatcagccaccctagcagctacctggaagcagaggcccgaaagattagtgctcaggggctgagacttcttcagggaagcacaacctggatggctttgaaatgactatgtctggaacccgcacaacttactattgctgttgcaaaagatctcatcaaacaagcttcctctggagggaattatgcacaaacaatactaaaagaggttttaaaataacttcactttttgggagaagaaaaagagcacttaatttctggactttattgaaagtccctgtcatgtcttcagaaatcccttcatgggctgttttatgactccatcggcagattaggctcttcctgctccacactaattgctaagcactattgcctaataattgtgccattaacctatgtcagcagtgtaactattgtgattcccatgccatgctcagaagagctgtttcatctaaccttttgaaagtagaaaatcattagacagtggaatctatttctctttgaatagttgttaacttacacttgcccaatgatattaatttttgacacatttctattttgatgtatttacttagcaaaatggaatattgaacctttctgctttcctatgtacatgcatcgtttactatgtagtcatcaccaaattaaaaatggaaaaaaataaaataacctcagttttatctctcattaaaaatagaacatagatcttaagttataccctctttgctgcatactttcatctatttatttgctgtttataatagtaaagatggtcactcttcctggatgtcaatggccaatgaggaatgcatggccttgggctgttcttcagatcaacacggaattcccaaccaggctctaattcctgcagaagtgccttgcccttggatgcttgtgcttaaataatccacacatgactctcttaaccaagccaaatgcacttctttcccattctggacaccagaggtagagaagctcaaatcctaccctgtagtcaaaggctgaggaataaggtaatttaagacttcagtggttgttccaacttacagcaccatctgcaaccccactggagacctcaaaactatcagactccacagacagtgctaaactgcaccctgtggatgtgacacgaatacagtttttctttcagtgtcacttaacgtcatgtgttacaaatgcttatgatctaatgcattgtattaaattttgaaacattagaagcttaaaaactctacaaaacccttatcatgacatgtatgtaggctgtttccataaagtcaacagaaattaaggggaaactacaaaatgtaagtgacaaaaaaagtgttaaataatacaattttacagtaggcatagaaagttatcacaggaagggatcttggagctctgtggttcaatttctccctgtccaggtgagtgcccaatggtgcgatgacttgtaaggtcatgcacgggtctatggtgtatcccagaattgtacccaaggcccagagcttcatgagcagcaggtcttctcatgcccagtctctcaccgtgggtgttctaacagaggcttccctcacttctggacagaatcatggctctttctctccatctgaatgaaggcttttcatcccatctctttccctctgggcccttccccatgaccactcccttctcctctcaggtatgttcaagcacaaacccatcccttgctctgaggatctcatccctgctgtgtggcatttccagccatacaccttctctttagctgatgttttctctaattcctttcttgacatccttcattatgagcttcatctaaatgaaagtcgccttttcccattttcaccctcctgtgtctgtaacagcttctcctgagttcccatctcttaaatattccacattttcacattgaagcatcagggcagtgcagtggttatagatatgagccctgattcccacacgtagcctttctatgcctcaatctcttcatatataaaaagtgaataagaatagtacccagctcattaaactgtcatgaggaccaagtggcagaatccacatgaaatccttaatgttcttcaattcttattgatcagaaatcacccaggggtgtcaaatatcatccatggactaaatcctgcatcccttctattgttttcccttcctcctatttccaggttccagggaattcccatacacactacctgtttacactgaccctcactataaaaactttttgttggccgggtgcagtggttcacgcctctaatcccagcactttggtaggccaaggtgggcagatcacgaggtcaggagatcgagaccatcctggctaacacggtgaaaccccgtctctactaaaaatagaaaaaattagctgggcgtggtggtgggtacctgtagtcccagctacttgggaggctaaggctggagagcggcgtgaatctgggaggcggagcttgcagtgagctgagatcacgccactgcactccagcctggggatgaagcgaaactccgtctcaaaacaaaacaaaacaaaacaacacaaaaaaacaaaaaacaactttttgttgaaccttgccttatcattaaaatgtgcctggtctgtgatccatcctgggggaaccaattataagattatcttgttaatttaaaaagaacatttttaacctaaagtgttaatgccagatgtcagattactaattattgcagagccatgtgaactaaacagggtgagatgtgtgggaccaagggggtagttacaagcacctcacaagtcatgccacttttcaggtaaaagtctcccccacctgcaggtcaccagtctcccagtctctgtgctgattggtgcatttgtcttgcctcccttaataaattttaagttcaagggcagataccatggttaatccaaatgttgttatcccccttcagatgatgcaataagtcatcatgaccataattatcatcatcatcatcatcagagagtcagtaatagcaggcacccatattaatcaataactagaatgcagaaacactctaaaatgcagataaagcaaaggaaaagatactattgctaccactaacacccagaaaaaaatctaacttatcaagtccgtcttgctcatctctggttttatgacatcatgaagtaggcaactccaaaaaccacatgatgacaagtagcaatgcaaagcattatttgcagtgacattagcatcattcagggttccatctgggtctttaatctgtaaaaatgcattaacaccaactaactgtagtccacagtccagccatagatgtttcattcatgtaaaatattgacatgtcgacagacataattactgagctttgttgactcagagggccagtaggattcttccagcgcagtctgaatcaacagtctggcggtgtttaatagcccctataaggagctggtttcacaaagagtgtgatgattctgggtgaagaggaaagctcataggacctgagatagaatcacagagacctgatgtgatgtagtggctttgttttttagctagagttttacagttcttcatagggaaaagaaaataagcaatccattaaacattagcagcattatttcagagatttcaccaagccctatctaaggcatgtcctgcccagcaaattgtgcatgctaagtgctttgtagggtgcctggtacatcattagggcccagtcaatgtctgatgctgtcatcacttcttgtctcctctatacacatggaaaagtctttttcatatgtgatagcatttcccaaagcaaatattcgtacccatgtataattaattatatacttatttgtgatattgtgatataataaaaaaatatctatctggtcttcatccctggttcctagcacagagctcctgtctttgtgcaggctgctctaacaaattaccataatctgggtagcgtaaacaacaaacatttacttttcaccattgtaaaggctaggaagtccaagaccaaggtgccagctgatctggtgtctagtgagggccctcttgctgatttgcagatgactctcttcttgctgtatcttcacatggcagagagagactcagcaagccctcttcatataagaacactaatcccattcctgaggattctatccccttgacctaattaccttccaaaggcccaacctcctaatacaatcacatcaggagttaagatttcaatagaagattttggggagggaacacaaaccttcaatacatagtaactcctaaaaccctataatttcctgaatagggtgacaggaacatcttttgttagaatatttcatctcagtacccagttcctgacataagaatttctaagacccttggaacccccagagtgataagagtgtccttttgaatgctaacaagaggactggtggttggtggctggtggctcctagataacttcaggatagagggacagaaagaccaaggcatgattaaaaggttgaaaggttgtacggcgccccaatcccctatctccagagagatcagagataaagttaatcatcaatgggccatgattcaatcaatcctttccaagtaataaaatttccatgaaactcctgtaatctacagatttcagataacttccagcttgtattcacatgaaggtgctgggaggatggtgcacccagcatgggcatgggagatctgcacccttctcctctgtactttgtccaatgtatctcttgcattgactgatcctgagctgtatcctttatcttaaacctgtaaccataaatgcagtgttcccctgagttctgtgagccattctagaagttatcaaacttgagaaggaggctgtgtgaatcttcaacttgcagctgattgatcaaaagcacagttggaaatctgggacttgcaactagtgtctgaaatgggggaagtcttgtaggactcacccctttgcctgtgggatcttcctcagatccaggtagttagtgtcagaattgaattgaatggtaggatactcagtttgcatccagggagttggagaactaattggtttgggggaaaacaaagcagttcagacggtttgatttttatagcttaatatcatcatgataattacaaaagcggcaccttggatcacaacgttctaatgtagacatggcagttacaattaaaattagttcattctacacttatcacctgccaagttctatgctagatccattgaaatagtcacctagattggttaagggttattaaatttaaaagaaaaaaataaatttaaactaaaacattgtctgaaactaaaccaggttggcacgccctctaagaaacatcacctggtttggtgcatcctcgcagaaagagagccatacagtgaagtggaaacacacccaaaagctctgcaatattcctagaagttctcgaatctcctccttaacagagctgcagaagggaaacacagacaggaagcacctgtttgactcagacagcagccctaatgcagtgccactcaggagcattccctcatttgaagaccccccaattacatgaaattatcaaccccattaaattccagccactgccattaactatcattagggctaaatcagttatctgatcacatcctgaaaaagtggatttcccgaataaggacctcccaattaagagaggcgtcctatatcagaaagcctaaattccctgagtagtcacttaattaccatatctacaagtttctaccgtgccgatctcaagtacaagttgcttgcaaagcaatggaatgaagccagcagacaggcagagagaggaggcgcattcagttatgggtctaggtaattaactcttcaacaaacaaccctggcactctacagagttgctctcaccatgctccacccttgttgcagaatctgctcttgtatgtagatgagcatttaacctaggcatgtttccatagggcatcttcaaaatcagtgcaaagtataaacccaacccctagcttgcttgttggtctccacacttgacacataactcatatcgccttttccaagcagtgtcctctgtgggtgtgccttgctataaataatttctacacctagacatggttcttatatttatgtttcttacagcactgaacatagcgtcttgcatatagtaagcacgcaacactttctatgagtgactgaatcatgaagctgaatatgagattttaagcccaaagatttaagaaatgtaaaagctaagtctctttctggagcggtgttacaccaagatgatccataaaatgccaaagagtaagatgaatttttggcaaacactacaagtctattatgaaacagcttatcataatagacttggatctacttgagtctaatcgtatctcccttaatattactaaaagcctaatataatacaactagcctataatccctgggtatcctacaaacaaatcaaactcaagtttctaaaccaggacatgttatttttcctttccattttgtgtctcctgtgtatttctagactctgttaatggagtcaccacttaccaagagcgccaatgccagaaaccttaatttctatcatttctttacctgcctcttgctgatcctccctagctctctcatgtcccattatatctattcccatacgtataagcgttggcagatcgtttctttcattgccacctcggaaatgtccctcaagtccagcttgttctagcttcacaaccactgtcgcagctcagacccaaattatctttccccagatgactgccaacagccctgcttccatgtgtccctcaacgacatcattcttcctactacatccagggtaatcttcctcaattaaaaacagagaaagccaaaaagctggatcactctattctcctgagttttttttttttttttaaaaagaagaaaaaaatcgagttattgcaagataaaaatctacagtccttcatttgtcatcaaagctctttgcaatcctactcggatgggcccaggtatgtgcctcatcctgcaaaatggaacaaccatgggttcttcctgtaaggcgccctgatcctgtttgacggggcccttgtctctccaccacttgttacggtaagcagaaagttttcccacatttaaaaaaattccagtaggaaaccttttccagaggtatgtttctaatacgacattccatttcccttatttctgcatatttttttaatggcacctttgttgccttgggtggcttttttcctaattgctcattcttaagcagctgaagtcctcaccagacctgacctttgatggcagacagggtgtgaatactgctcttggccccgactccttgctcacttgcccactgtgtgctggagaaattctcttcttggatgtggagctcaagattgctgtataaagctcctggcccaagccaatgtccatcaggttgtcttttcttctctttaagtaaaatgttttaaggtataatttacacaccacacattttaacatatagttttaaaaaatatttttatcaatacctaatatttgcacaaatctatggaatagggtgacattttgttacatgtatagaatgtgtagcaatcaagtcagggtacttagggtacccatcacctcaaccatttatcatttctctgttttggaaacatgtcaagtcctctctcctagctatttggaaatatgcaaacattattattaactatagtcaccctatcctgcaatcaaacattagaatgtattcacctacttgtataagcataaagtttgatgagttttgaaaaatatgtacgcccatgaaacctacactcttattaagatatagaacatttccattaccccagaaactccccctgggcctccttacattcaatccttctcatctcccacccccagcaaccctcatccactttctatcatagttttgcctcttcctcttccagaactcctgtgatggagtcatttacgacgtggtcttttgtccccaacttctttctcccagtatgtttttgagatccatctgcatcactgtgtggcttgccagttcattcctctcgttactgagcaggatttcaatgtgtggctatatcgccttgtttctccatttacctattgatagatagcgggatgtttccagtttgaggaaactagaaaatacatgtttttgtagaaagagaaaaataaatcatgggttcatatcatatttcgaacttaaatgaaaaagtataggatttccacttgattagttgattttattttgtatctccaggatgcaaatctgattttctaatgtcattaacaaaattacttatttccttgtcctacaatacatttatatgtatatctgtataattgtttgaagtaacaatactgatattattatagaattattatagaatgcagtttaagatttttctttatgttctctccttaggtatgtcccacatggaatatacaattaatttctgtgatgtcatacagaaatttctgtgctgtctctgcagttttaaaatttcattttgatgcataatgtttagttccataaaacattcacctggttccaaagtcagatctatatagcaagacctattcagaaaggtctagtgtctaaccttgtcccaacatttaaaaatagtttatttatcattctactggttctttgaaaaaatctagacatgtgtgactatctatgggtattactcgtttcttacacagaatgctaaacacatttatatggtttggctgtgtccctacccaaatctcatcttgaattgtaaccccataatccccatgtgttgtaagagggactcagtgggaggtaactgaatcatgggggtggctcccccatgttgttctcatgatagtaaattctcatgagatatgatggttttataagacgctccccccttcactgggcacttattctctctcctgctgccctgtgaagcggtgccttctgcaatgattctaagtttcctgaggcctccccagccatgtggaactgtgcatcaattaaacctctttcctctataacttacccagtctcgggtatgtccttacagcagcatgagaatggactaatatacacatgcttcttcaccttaaaatatacctagaagattacttcatgaaaacaaatcttcctcatttttttacacagctgcttctgtatggatgtaccacaattaatttaaccaatcaaccaacagctgatggacatatgggttgtttctagacttttctgtttataaaccatgcttcaataaataatctagtgcaaatatcattttatattttgccagtatctttgggattgtcttcctgaaatggtactgctggttcaaagggtaaatcctcgagtactctaaatagtgccaaatttccctctacagagctgtgtcatgttgtactcccactagcaatgcacaaagtgacacttactccagccttaccatagaatgtgttgtcaaactttttcatgtttaccaatcccatagttgagaaacagcatctcagtatagttcgagtttgcattttagccagttacccttctaatggggaaccaaatcatttttccctcgacatctgcattcacacctacagatgttttctaatctccctttgctggcacagtaatttctgttctcccccaaaatcccccaccccctcatttaggaccacagactaggtggaatttcaccacctgactctcccttccatggtggaaccaagcttgcctcaaatgcagttctggagcgacagtatcctgggctagaagcaatgggaaaggcaaaaaaatgcaactttgcaactctttccagaaatatatttttcaataattatagatgtcattactgttacatcacaactttcattttcccttccttgctcagaaaataccaccgtaatggattcaaatattatgggaacaagttgttagaagagaacacattatcttattctgccacctggactttgagttccgaggccctgggttggtaaactctaaagaagataagctgggctcctcatctatgttagctatgctcataaggacatctggggtcacattctttttgcagccatggatcagacttgggaaaaaaagataagaataaaccattgtaaaattcagctacaacttaacatcatggtggcagaaagagaaagagtcaaagtgaacccaattgccaaagcattactacgaaataaaagtcaacctctcctgatatctcctgccatttctttctgggaaactctgtccacatggcatggacttcctcagcagggggactgagtcctggaaatgcatggagctctccaggcactgacaggaactgaccaggctaaccagacctccaaggactcacccacaatcccgccatcgggccagtgcttttgttctctgctctgtctcacactgtcctctggagaggtttaggctctaaagccaaaaccctcaccctttccacaaacagagtttgtaatattttagtgtaatttcaccgagcatgttgggaaatgaaatagcagtccacacccagcggtctacttaaaatatcagcaagaaaggcaaaaattcactcccagggtggcaaaaagccattccaatcctcagagaatgagctcagacatctactgagaaccaaaaagcatcatctgcagagggtagactgtttaatcaaaatgggcacactggtttcaagagtatgaaggtctaacctcacatgtgctttggtcgggagaagcaaaaaagcagaagaaggaactgggggccacatttagatccagattactggacagaaaagtatagtcataaaaactcagaatcagacggtgggttggcagcaaatgacttttttcccattaagtagtttgtgggtggaggcagatctccaaatacttcgtggcagtgccactgagtaaagcatggctcgtgcctcgattggttaataccaacactgacacatgctccatcctcctgtggaacaagaaatactttcactgatattatttttgggtagatgagctgagacctttcttcctttctctggtcaaattacttagcatgcatgatacattaaactaaaaactgtccacagaagtggcaatacttaagtagtgatgatctcatttatttgaggtttgacacaagccagcagagtgtttatgactcccaagcaggcatcaacaaaccccaaaggctgttatcaatactaagtatttgccttaactaggacattccaagagtggcttcccatagtggtcaagtggtaacctctgtggtcagctttacttggtgttacaagttatataagataaatactggaagacctggtttaaattccatctacctgggctgatggtctgtgccaaagaatacattgtcattagcatgttcagttgagaattacatcagattgcaatgagtgtaatgacctcaaacatttacaggtaagaccagggacttactatggtgtgccactaatgtaaagagactgtacaacagtgtccttcaaaccttaaagtgcatgcagatcacccagggatcttgcttaactgcaaactctgatgcagtaggtctgagattctggatttctaagaagcttccagggaatgcccctgtaattgggatgtagttggtccatggcacccactctgagtagcaaagctgtaaaaaacaccaaatgtagaattcaaataatttttctcccttcaaggcagtcctaggaatgtaaattccaaaattgtagccattgctcaagatgttatttaatatctctcttagatacaattttgcaatgtgttctaaaatcagttcaggtattttctagttactcgttccttttggctcctgataataatgctccattggatcgttcaactcatctgccagccttggtgccaaaaaaggcatgaattcaaaagatgggctcctgcgtccacgggcaagtaaacatttttcaaagttgtgtggagcaatgggaactgttctaaaaggacctgcaatcgtttggaaactaaagtcaaatctgctagttaaatactagtcttgatcattagctcttccatgcaaaaacaatcaaacaataataatagtaataatataactagtacttaaatgcattttggttttgttttgttttgtttttgagacacgatctcactctgttaaggtgcatttagccattggctataagcatgctataacagtttgtttgtttttttttcccacatcacctctgggcagcatccgggaactctgtgggactacatcgatgcaatgtcaatgaaataataataatctttatatcatatggtgatattattcacatttgtatttgctatataagatttactatgtgacaggcacatttctcagggctgttttacatgcatccacttatctgagcctcacagcaactctacaatcaagtcacccttcttacctccatgtgcaggctgagacacctgaggcatagagcaatacagtagggtgggtggttccagcaagctggtgaaaaatcaagagcccaggctctatcactcctgcatcttggtggctgctgtcattaggagttggtttgcttgacccagatagataagtgaaagccaaaacccactatgacttctgtggagcttggactccccaacacccatttcccacctttgcagctgcctgtgcatggtgatcatgccacagcagggaggttcggcctggccttggcatgctgaagtccaggaggaagcactgagttaagctcacaagtaagaatcaaggacatttgggtcaccatttgaaaaacccttgttataagggtttttcaacatcacgaaacatttttattttgtgcacgaaggaagaattgcttcatacagtggtaaaaaaaaaaattctatgaaacctctgcattggaaatggctaaaaaatattaggaccagttgtagatcaagatgttttatcaggttcccttgttaagtggtctgttctggagctcctaagacatgccaggagatctggcagtaagttaagaatgacttcaaagacagtcctgctaaaatagatactaagcatggcaccctgggtctggcttcaggtagtaattgatgtttgggaggtacacattttattttatgaaaggaacagataagtttaacatcatcagatatttctctctctcgctcgctctctctctctctctccccccctccctccctctctctggaagcaaagagtatgtttgctgtgtgtgaatcaatttaaactggtgtgtgatggaaatatttcatggtgagttgcccgtgtaactgaaaaaaattataataatagcaaacacttaaatggtttatgctgtttataagtattagctattttaatcaacaaattgatcctatgagacaggtactgttatcattcctatttttctaatgcagaaactctatagagaagttctgtgactcaactgaagggccagatggggagtaagccatggggatagaatttaagttggggcagtctgtcctcagtgccattgctcctgccctccaggaacactgcctctccatcaaagttcctctcctgatcttacctccagggacctctgcacaggctcttccccttttcctgcagtgtcaaaatcctgcccctagtcctcaaggaatgactcctctggagtccctcaggtttagagttgccagataaaatgcaggatcaaacattgcatagaagagcttgggcacggtggctcacgcttgtaatcccaacactttaggaggctgaggcaggaggattgcttgaagccaggagttcaagaccaggccaagaccagggcaacacagtgagatcccatctctgaaaacaaaattagttgggcatagtggcacatgcctgtagtcccaactactcaggaggctgagacgagaggatcactggaggctgaggctgcagtgagctatgatcatgccattgcactccagcctgggtggcagagtgagaccatctctaaatatgtatttatacacacacacaaactatacacacatacatgtgcacacacacgtataaacatacatacatattatatattgcatagaacatacttatactaaaattctgtttgttgtttctctgaaattcaaatttaactggttgtcctatatttgtatttgctattaggttggtgcaaaagtaattgcagtttttgccatgactttcaatggcaaaaactgcaattacttttgcaccaacttaatatatttcacattcctacttagagattagcttcaataccttctcctcaaaggcctttccacagactcaagagcacaccccctccccacattgccattgtctcctcactgtaaatctctgcatggtactcaagcacatctgacgcctgctatgagaatgtcacccagtgaagcagaagacagacatgcttgtccatctggtctaccactctatagattggataaagataatgtggcacatatacaccatggaatactatgcagccataaaaaagggatgtcctttgcagggacatggatgaagctggaaaccatgattctcagcaaactaacccaagaacagaaaaccaaacaccgcaggttctcactcataagtgggagttgaacaatgagaacacatggacacagggaggggagcatcacataccagggcctgtcagcgggtggggggttaggggagggatagcattaggagaaatacctaatgtagatgacgggttgatgtacagcaaacccaccatggcacgtgtatacctatgtaacaaacctgcacgttctgcacatgtaccctggaacttaaagtataatttaaaaagaaaaaaaaaaaagcctaaacgagtctctgatgaataacaggtatgtgataacagtatgtggaaagaataaatgaatgtgtgtcacctgctgcaagacttctggaggatgtttccttacctccagagaacacagaaaagttcaccagaagatgtgctatacgtccttgtcttttccatgttttgtgtgagtaacttggaactaaacacacgttcctaatttcctacttcaaaggcaatgaatttcccagtgcctgatgattatttatattttaaatattttgaaagaaatgtcagtttccttgcaacaaattaagtgtatgttcttgaaaatggagagcacgatcccctcagcatgcatatggtaaatgccctcaaacacgcaaacagagtccacgtctttgaaaaacactttcaacacaataacagccaggaagaagtggtctatttttatacagcagcccccacatgacacagcaaatcaaacacattatttcactaattcttttttacctgttgcttcaggtgaataaagtcacaatgtgtgtagaacaagtgagtgaccctttacaaagactcttgttccccctagagatttcattgtggcaaggaaatagctctagagtagatcatttttaacctagtgaacagccacaatgaaggtttgataaaagatgaaccaaatgaagtaagaacaggaagcttgagactctctgctctgctcaatccataccatttccagaacgggtcaagcactcagaagtgccctgtggctgtctggcactagaaactcatggaaggtaaattttttatgttttatttttcattaaaacagactaagaaattgcctaaaggcaagttccatatgtttggctgttgtttaaaccttagtttcttaaatacatttgaataaaactatgacagaagaatcattggtcgctaatttttaaaagagtaaatattaggtaaagataaaatgaattactgactttatttcatagttataatatcttaagttggaaagactcttttactttaatcattgtggggaagaagtataagaaaaattttaagactattggggtgcaaaccacagggtgtagcctatatctactccacatgcacccttctgaagttcttatatcctaacctcatttttcatccaaccttaaatgataccacaaaaatgcacttaccgaccaagccttttttttttttttttttttttgagacggagtctcgctctgtcgcccaggccggactgcggactgcagtggcgcaatctcggctcactgcaagctccgcttcccgggttcacgccattctcctgcctcagcctccccagtagctgggactacaggcgcccgccaccgcgcccggctaatttttttttgtatttttagtagagacggggtttcaccttgttagccaggaaggtctcgatctcctgacctcatgatccacccgcctcggcctcccaaagtgctgggattacaggcgtgagccaccgcgcccggccccaagccttttttttttaatgtcagaacttttctccaagtgaaaaacaccaataatacacaccctccattttcccacaaatccctcttctttccccatatcttatcaacctttcaacgaattggtcaacactctccattaacaaacttttaaagtaagaaaaatggatgatgactgcttaaaatgagaatcctactgtaaaaatcattgattctttatctggaaattccaaaatgtcacccaatgtaaaatgaactggcttaaggagaattttatactaaactttctcataaaatgttattttttaaaaatagggaggagtgaaaatgaacttactgggaggtacagcaaactagcaaactacttattttgtatttgggggaatgtgtggaaccatttagaggtacagaaaccctctctgaaagaaagaatgatttgacaatgttatctgaaacttcccaatgccaatcttttcaaagtctagctgttttattagttactgagagagggatatcaaaatctccacctatggttgtgaatttatctattttttcctttaattttgtcagcttttgctgacaagtcatagctcaaatttgggaaacactgtttcgggagaccacagaggagatacaaccgtggaaccaaatgaaccatgatgtagctctctgaactgatgttcacagaagtcactgccctacacatttggcaattctattttaagatatgaccatgttttggtctatatgcaaacctttccctgaagtgccattcaccttttcctgaattgtcatttttctcaaactgttgactaaggatgaacatctgttaagaagtgccacctcctgtctgagaaacatggagcatgtaaagccactgtagggaagatgacatgcaatcactataacgcacgggctttcctttaagtcagctttgccatgtaatctcttcagcatgcattagctgtgtagccattgggatgtttcttaactgctatgaactcaattacatcatctgtaaaatgtctttgaaataactatctcattaggttgaaggccatgaggatttaatgagataaagtatatataaactgctgttcatatagtaggtgctcaataaatgctagcttcccttctgcatttccgtttatatgctagcaaggtcaagagcagatgcataaacaagaccgaattttctagtccgtatttataagatcttaactcatgttcagtaattaacactaatatacacaaatgaatatagaacaaaatgacttatacacactttcaggtatctcacacacaaatgctttaaatgccgttgaaaagttttgggaccttttcagtcactttgaatattcggttcatcgatcttcctttgcccccaggcaccatttgggggtctcaccatatccttctctctgtgactcctctggttggtgccatggctggcaaagtcctaagggatgccaagagaattcccctccatcagagcatctggagaagcacaccacctacagagctcctgggacaggtccaggaggttaaatgtctgtttagaaccattatccattctctattacacacacaggggacagtccacgaccattcattgcatcaagatcaaaacataatgtgttgcaggtagggaagatacacatcacttggcaattgcattgcatttgctattcaggttctcaaagccttgaaagacagcaaatgtctacaattccccagtgcgagatgatgggagatataaactaaatggcagagatcaaaatctcttctttggcattccgcaacacttgagacagcttagtgccaagagcaccagatttagagtctaaagacctggatgtgaacctgaattttagtttagatactggtatgtttccgaacctcaaatacaagacctgtaagatggggataataaagacttcctcctggtgttactgttcaagaatcagataaagcaaatatgtgagatattgggatcatctttgcttaccttgtaaaaggcagactctaaatcatttctaggaattatcaaggtctataccttcagtgctgtaactattctcacgttttgccagtagctttcctccagctggagtaaattgtaaaatccctcactggtatcatgatgctgtttaaggaggtggtttttcagatgagagcaccgaggccaatgtaaatgccacatgcatcaaattcatgtgtgctgattcaaagactaatagtcttttagctctgcaccttctttgtgacaaaataaatttgtcatcagtaatgaaacttaaaacttggctggcaaatccttaatgctctttgcctttaaaataaaatttgaaaaaccttcagttctatgtattgacatctttacctctgatatattaacaaaccattagcagtttaagggctgaaaggcccaagtagtgttatgcatgacgtctgggacatagctgaaattcaagggtctcacaccatgacctgcccattatttcaactgaaacctcactcccgcacctcgggcaccctaggcacaggggatattctcagaaaatggaacataaatggcattggaacatggagacaagaccttattaactagaattatcactcgactttggaaattactttaaaactgaatgccattctcatggatagtaaaatatgacacccaaggcggttctcaacactttgaaatcatttgagtttggattagacaaaactccataaaatatacacatttgcatgcacagagaaagatcaagattatgtgtacatgtacttagcttacgaattataagtggattttttgtgtatttttacattgtttatacccacatataggcatatatgaatatttacaacgaagccaaaatttttttaaacgtactccaaatcaagttaatactcattaagaaaggaagaacaaaatacagcaaattctccattatttgtgtcaataaggttaaggcacaggttcagattttgctttgaaatgcagaatgtgatgattttgcagcatgcttattcatattaaaattttcccctcaggacaggtggagaatagctaactccacagctatgagaagtagcctgggggtgaatcaaacaacaaaatatactaggtgcatggaattttacttggaagtcacaatattcccattttccaggtaagaaaactgagtcttaaaccacagtggtaataaagaaaaaattgttcatgacatgtgttaaagacaggaaggaagactttattcaatgggagactattgtaataggtataggggccactgcaatataatttttgaatgggagagacagattggaacgaattccaaatacagcaagaccaagtggaaatttacagccaaggaacagggtagggaccagtggatggaaaattaataagaggaaacatcagaggtaaggggaacgtacttacttaatacagcaaatcaaacacactatttcactaattcttttttacctgttgtttcaggtgaatgaagtcacaatttgtgtagaacaagtgagtgaccctttacaaaaattcttagcaggactcttgctgaagacaggccagggtgatcacccattatgggggatggtgaaggatgaggaatctgatcagacatagaaggtgatcgaatattgagggggaggggttctgggtcaactgacttagcaggattcttgccaacactggaccatgcatgagaatccaaacatcaagacctaatcagggagagactttagaaggagagaatcttggctgggtgcagtagctcatacctgtaatcccagcacttgtggaggccaaggtgggtggatcacggggtcaggagttagagaccagcctggccaagatggtgaagccccatctccactaaaaatacaaaaattagccaggtgcagtgtcgggtgcctgtaatcccagttactcgggaggctgaggcaggagaatcacttgaacctggggggcagaggttgcagtgagccgaggtcacaccactgcactctaacctgggcgacagagcaagactccatctcaaaaaaaaaaaaaaaaaaaaaaacaaggagagaatctttgtcatttgtcaaagcgtaccacaaaggctattcccattttccttttatctttagttaacaaacacttaagtcagtgtaactgtgcaccaggcactattgtaaagagctttatacatcttaactcaattatccctctggaccacccatggaggcagtaccattattagctttgttgtacaggtgaggaaacttaggccagagagcttagtaacttgccaaagattgcatagctggtaggtggaggagaagggatggagtgaatctaggttttgtggggcctgaaacttacacaatttgtggaactatgtaagaaaaataatacaaaataggaaatacaaaattagtcatgaatgagagaataaatcataacaaattactgatgccgtggagattcagggccttttgaatctagttggagtagggaagccagtgtgtggtcaggaaacattgctagtcaattgactattgacgagatatcaatatcaactattccatccaagagatatcaactattccataatttgctcccgggacattccatctgcatttctaactcatttgctttgtatattacgttctttgacttcaccagggccttccttgcccttccatttcccctaatcttactcaccctgctgtctgggatcaagtactgtaccatccgtgacgccactaaaagccagggccattcctccctctgtggtctcccagaacagtgtttcccaggctttgagctgtgactcataagcaaaggctgacaaaatttaaagaagaaatagataaatccacaaccataggtggagattttgatatccctctctaactgatagaacaactagactttgaaaagatgggaattgggaagtttcaaataacactgtcgaacaatttgacttgtccagctgtagtaactacaaaacttcagaatgcatgttctctcaaatgcacgtgaaacagccaccaagggaaccatatcgtgagccataaatcacatctcagtgaccttctgggaacagagtatattctctgacggcaataaaattaaattagaaaccaatagcattaagacatctagaaaatctccaaatatttggaaattaataacatactgcttaatgactcacgggccaaaaaggaagtcaaaaattagaaaatgtttggaggacctatcatcctttgttacagaaaactaaatgtatttcccatctcatgtatagatatggagggagaacatcagattttaagctttttctcatttatgccacatcctgtgatcaattaaccctcaagttactaagttagtaacttccagctaatgcacatctcttgtcattttcaaggactaagcagaaagaataaaaccttgtatttagaaaaacacaaaacttgcaaaatataaaaatagcaagaggagggtgagtcacttctcctggagtgcttctgaacgggtaacccatttgaacctagctgcactcgcagctgacaatcttaaatctgcatatgcaatttgccattggttcattttcttctgcagaagatgggaacctcattcacataatttttgtacagtcccccatacaatacctttcaccgttgggtaccatggagagattggcaggatgacctactggatgacagcagtgtctctcttggagttgtctgccaatgagctagctggactggaggctcttcttgcccagtaagaaagactaggcgtagtcccgacctctcaccttgcctctgctcaacagccaatgtctccaacccaggtttgcaactccccagagcaactggcacttaaacttgatctgcttttcttctgacattttagtgaccttttcaaagaactctctagaaaaatagagcaacagggagcagggtccctgaactggaacacaaccctgatgcatccaaccatttttggcttgaaaatatttctccccagtatctgagaagtgatgtccatggtagtctgcgtccttctgcctgaaagtgtgatactcactcgatacctccctagaccttttgctagacaggactgaatgcattaaagtgataacagctagaccattaactggctctcttggatggagcaacatactaactcaacacagaagatcacattggagccatctcggcacattcgctcagaaatactcattttaaaacatcttaaagtggaatttatgggatgaagtcaataacccatattattacaagtttataaataactttttcattggtagatagttaatatcttcacagagctataatttttccactgaatcccctgtatataagaacaccttgcttaaaaattaaaagttaataatctttttaaaaagaatatcttgtgtgtttattcaattgggtctacaatttctgcataaagaatgtgttctgtatatattatagatgtttctgcaaccaccacacatggccagacttatttttttattaataaatataacatgatgctttagaatgtttcattgtcctttttatttaaataagttatcagcgtgcctgctgtacccatcgtaaggactctgggtacattcatgagatatatgtggttagttcattttcatggtaagatctagttttccctccatgactaattctagtgttttagacaaatatcataagaaatgcctatctttggagcagacagattttgcagaactctgtatatctgcgctctggacctctacactgtagttacatcattctgaagaaattagtaatatccatcatatccttccaacacgagcaaaaaccaccaggtggggattgggcaacaagacagattagcattctaattgcatctaaagcaaaaagtaaaatttttaaataataacttttgacatccctggaaagcctgtagcagaccatctttaattttaaaaaaaattaaaaggttgtctctaacatttccctgatggtaacttataccaccagtttcttaagcaccttccatgggcctaaccccagctataattctggccctcactggagttccgggcacatgaaagcaaggacttgctcattttgtccactgctaaaccctcatggctggcccagtgcatgacacatggagacactcaagaagtctctgttggtggagtgtgtccactactgtagggggcttaaggctagaggctcattccagcaggcacatttcctggtctgccttcatggagataggagaaagagaacaatggagggagggagggagggagggagaggaagaacaagagaagaggaaagggaagagtaagatgaggaagaagaggaagaagaagaggaggaggagagagaggaaggagaagaggaagaggaaaagaaggtgaggaggggggaatagatgatgtcttgtgctttcattaccccaaagcatttgagtcaagcgttaagaagttatgcactcagacaataaattaaacttatcattttctacctgatattttaaacaccacatggttactaccttaagaaatatgagaaaatggaatcatattggttaacatgacttcccatgttttgttccatattcataggagtgtcattcctaaagtaagcttttagctagaacaaaaaagcaagaatcccactgctccatattctactgcttcctaccaagctccaaccaatggacgcataggcaggtcttcttttgtcatgtctcctgccagtcttcctaccttatccacagaaatcattttatatagatccatagagtgtcacacccaggagagtcaagtgtcatactcaggaccatcacttgtcacagaagcagcctgcccccttagcccacgggacgcagctaatgcccttctgagactattgagctatggtttcatggaaatttcaaggaaggttctcactaaggccatgatcttagcttggagcatggtctctagggctgaatgatcttctagtagtatgggttcaccatccctttccttccaccatgtgaatcttctctcgggcctccacttctctatgggcttcagtactatatgcagaaagccccaactctgtgtcactacaaggagccttgaccttgacctcctataggaaaggcactgagagttatcccaaggataaagacccatcattttaggaccaatacagagtctaaaagatcacaacatgaaaagagagatcagagcaaagattaacagagcagcacttctattgccaagggcaacaggttgcacctaaaaatatttctgttttaaaggagaaatagttcaaatgacttctttaaaacaaataagcctgatttactacactttacagattcctatttgtaagaaagaaagttctagacttagaagataaataaataagtgaatacataaataaaagtttctgaccccatggtccatgcccaggacacattcattgacgacacgcattcgtaaatactctctaagaactacacagctgtggttagtcatattgtttcttgattaagtaactgtagtttcattcagatccttttaaaaagtacatttttagcatatcttccattttaaaaatacattctctcattcttgccattcatgtactttgaaacgcttccctaaagatcgacatcaacagtgttgaaaaagaaaatatttgggaacaggaatgaaccctagtggaatgggttcctacaccaaagatcctatgaatccatgcttcattgtgcaaagtgaacccctactcttatggacctgctgctagagctctgataggtgttgaatgatcccagaacctgaaggacctatttgaattcagatcattggtcttatcatcctcagtagctatatctttgtcagtctacaagtactagccttgaagttttatgacactttattctcataaggatcattttttttccatagcagacagaccctacatacccctcaagtaaacccttttttgcactatagagtctacgtcaaggaatcctcactgtgtttacattctgattttcaaacatttcaatttgtaagtaagtgtatgtgttgccttcagggcagtgtaaatagcttgcccaaaaatctcagcataaattttcacctctcctttcaaggcctcaattctcttctctacctctgatgatgtattgacttgggtattaatcatctttaaacatttaattactgtctgagtgccacgtctcaccttcagtgctgttcctcacaaagctggatccagtacagtacagcatctttaaaccaatgcacaactaacagatttgttgctgcaaaatacttttatgcagcatcaataaaacctctccagcaagcacagagagccaatggtcagagtcccagggggccttccacacaggatacgcatcttgttacagaattcctcaatgcctttttgctgtctccctaatgaccagttaaatggtctccctcgaggatgcttgagtcagcgccagcttgaaaactgctgaggaaacatcctcttttactggaaatgatttccatccaacggccatgtgccatatttagactcacggcttagtaacacccaacagaaggggctaagtttgcagaagaggaggccctgtgctgtgagaaaagaacttgcttttgtctggccaagtgaccgcaggggctggagctggtgagtctgtggtggtctggaacccgagggacagaaacgctccattctatctggagagacaggcgtctcttctgcagggcagctggttcttcccatgctgcttgtcttacacatcagagacctgactggggaggtggtgattcaagtctagcccacgtctgcctggcaataagacattaaaacccaaggactctgtttgcctgcgttcaacaggcgggatggatggcaggcaaatctatcttcatctccctttaaaagtaaatcacacaagaatgatattaacatatcttgagtcacagagtaaaattctgctaaagagcagaaccactgaattatagagctttaaaatgtatctatacatattaacactaataatttaatataaacatttaagtgtggatatgagattttaagtgctctcttttctctctcagttttccttggcctctctattctccctgctccccaatatccacccacattaactcatacaatcaacttagcttgcacccttccatgttcctcctcaggttcatctagttttatgcagacacgtatacacatatccacacagatacatcctttatgtcattattttcttaaaaagtagaatcccctgtcaaacacttctctgcatcttgtttttctctcccaaaaagagaaaggaaaacacccccacatcaacccctatagctgtgactcagtctctctaatagttgtgtattccaggctatggaaatttcataatttttctatccattcctttatggataaggcaaaacttcttgcaactctgtcttgctctatttctataatttccaactggaaatcaaaacaaagaattcttacacaaatcttacatgtattttctttaacaaaaaccaagaaaagttctcccttaagccctaacacaagcccatcttattttcagtgcagagggcaatgctgttttaaaatgtgggttttatgattatccaaggactatgaggccaacagctcaggaaaggactacaattgcaaagatagctcatgactcacggttcccccgaggaggaggcagccatgtcatgcagggtcatatgcggaagcaccagcgttggtcaggaggctgagggagtgaggggaaggcatgaaaagaggctttatgagggattccaaggaaggaatgagtatagcaggataagcaagctaagcaggtttagggttagctagcttgaataacttctgcaggctcgagtgtttggcagctgtcctgggttgtccaacatctgcccttggtgtgattagggcaggtaaacagtggcccagaggtggctggcagggtatgggctttggactgattggcttgcatatgaaaggtgctcttctaagttagttgattgttatctttgggaattagctaacgctctcccctccaaggggcagtccctcctgacccgtgagaccgcaggtgccagggcttcaagaatacagaaaataagaaagaagttaatacaaatgcctagacactcaagcaatgtttgataaatgataggcaggctgatcaaggaaacacaatacactctgcctcctgcccaaaggcacagctccacagactcaaccaggttgttgcatagagccttagtctccgaggggtgcaaatgagctccttccaaggatgaggtggggaggagtactgttggggctgagtggctgatagctagcaggacagcatgaagcatgctgagctacagctgtggcagggaggatgatcatagttgctgtttgttctacaaagcttgcagtcctatctagagacacctacttggcctcaatttccttgctcttttggccaattgctgcacactcttgagcagcaagtggaatggcagaagccccctccctagagttggggagtcagctgctagttctttgaccatgtttacttctccattgaagaagctctctgtcgttctgcctccagcatccccacatcccctgctcatgggaggaaggatgaaatcagaattctccttgccatgcatgaagaaggatctcattagaccttgtactggggcttctttgctagttatgtccctgtccccacacacactggtacataatcactctgtgttgtatgcattcattccttgtcattttgtcatgcatttatgaagaggatatagggttagagatatgttattcctgaaaataaatatctgtaaaggggatcatgagtgcaacaagacaaaagaaatcaaggtgtttggatttttcctcttcctccccgtcagccttcctccctctattcttcctcttcactgtctggccctaatgcaggtgttgttgagtttgagttaactgagaaaaaaaaaactgagtttaaaactagccagtccaatttaattcattcaataagcatgcactgtgagtccattctatacaaggcttgcagatactacaatgagcagcatggtccctgccttcaaaacacttgttatttaatgataaaaaatgattatatattaagcattgtcaaaaactatgaagggtctgaaattataacctatttgcaagctaacaagttagtctgccacaatttcatggatgctggtagaagacaggagactcctgggtcagagacaaagaacttcattactcacagcacagcaggcggcatgaagtttgcatttactttggtttcccttacccctcaacccttgcagaggtgaggaggagaagcccaagtggaggttgcatacacagtgagtttgtgtcacaactgaggagctacaagcttagaacatccaaatcttcataaagggctgcaagcaaacctgccgaaccctttgccccagcaggatacactatctctatcatccaaggatgtgcacgaaacaaacattcttgaaaagatagtccagcaaaaaatgtagttactgttcttcttataagacatgcagaaccatgaggcaccttggggaattgtctccctaaaagcatttaccacctgtcaggaattgtcttaaattcaggatctcacttcatcatcacagccactccacttgacatcccacttcctatcctgcagtgtaagaaatggatgcatgcctcaacttcaggctcaacaatacataaataaaagtggccaaagaaattggattcaaatctgattccaagttgtgacctgcatcctcaagaagcttgtccatcttcttatgggaggacaatcaactgtccaaaagatgtatattttccaggtacataggtaggagttttgtcaaagacagggtgatatttaccactcacctcctgacacgacctacctacaacaaaacaaaactcactcaggagggtcctgactatgtactcagagattatacccatgcacaggtaacgatggaagtcatgagacaaatctcaaatagatttaataagctaaacctcacaggcaactcttttcctccatgaaggtatctatcctggtcaaggcatcaaaatgaccacagtgttactgtagtatgtatttatctgacagggtagaacaataccttgaaatttgcaaattgaagtattgtaaacataggcaattgctatgtttagctcgtgtttctccattccagaaataattatttacagccctcctagggccaagctgattctgcctgcccttgcattgtgggcattttccattcacagccagacctgccaaaagcagagtatctgaatgttttaactgtgggttttctttttttcaaaatccggtacatttttttggtatttaataaagcataatgaatagcattgactatgatacctttccaaacctagacattttaatttcatcattccatgtttaacctaggaaacagtggcttgtttaatgaatgtgccagttttatgctttgtgttaatgtgacctaagcgaaacacaattaaattttaaattaacatatccttataaaaataacttaaatctttatcttctctaactcttcctctgaagagaaaattatgcttctgcccaaaaagtagcaagtggagtatgtgcccaacttcagacttggcagggtgatgttgcccttggatatcaggaatatctggatgcaaggacacactgatagactccatccccatcactaccctccaccaaaaaagaaaaagaaaataaacacttcaggcttttttcagttatcgaaaatgtgtgaatggtgatccatgtctggtcttcatcctaacttcaattcccaccctcaaccccaggcaacccctccacctcaattccatagaacctcccttaaattcccccttcagccagtggacaacactgagtgttactatgggttgtattagtcagttctcatgctgctataaggacatactcaagactggataatttataaaggaaaagggtttaattggctcacagttcagcatgactggggaggcctcaggaaacttacaatcgtggcggaaggggaagcaaacacatccttcttcacatggcagcaggaaagagaagcgctgagcaaaaggggaaaagcccattataaagccaccagatctggtgagaattcactcactatcgcgagaacagcatgggggaaaatgacatccatgattcaattacctcctactgggttcctcccacaacacatccagagattacaatccaagatgagatttggatggggacacaaaaccaaaccatatcataggttaaattgtgtctcccaccccaaaaatgtgtatgttgaagtcctaaccttcagtactcagaatgtgacattatttggaaatagggtcattgcagatggagttagttaagatgaggtcattaggatgagtccctaatccaatatgactggtgctcttacaaaaaggggaagtttggacacagagccatgcacatgggtgggaagaatcccaaatgaacggataggcagagggttggagagatgcatcaacaaggaacaccaaagattgccagcaacccccagaagctgggggagaggcctggaacagattctccctcacagcctgagaggaaccaagctggctgacaccttgatctcaggttaccggccttgagaactgagagaccctgggtttctgttgtttaagcctctcagggtgcagcactttattatggaagcctgagctgactaatacaggtgtctctatatctcactgagggaaagtgacaggaaagtaagaaccatttatgtccaagagtccagaggagtcaaccagattctgggggaaaagaaggtacaatgctggcctctccatgcagcctagtccccaacacttgtagggcccagggcaagatctaaagcactctctcacctatgcatctatatgctgtaactcagataaacaaactattaaataatatatgtgtcttgcctctcaatctgacaattacacctttataatagcaacataggaaaataactaaaactatggtttttaggcaaccaaataccagcaaaatgtaataattcctattattagatatgtttaagtgttctgctggtgggtcagcatctttggtagagtcataaaattaaaatgtacataattaattaaatattatatgtttattccctaacatttatttctgtcatttcttttttctttttttcagacagtctcactcttttgcccaggccggagtgcagtggcgtgatctcagctcactgcaacctccgcctcccaggttcaagcgattctccagcctcagcctcccaagtcgctgggattacagatgcctgccaccacgcccggctaatttctgtgtttttagtagagacggggtttcaccatgttggccaggctggtcttgaactcctgacctcaggtgatccacctgcctcggccactcaaagtgctgggattacaggcgtgatccaccgcacctggcctatttatttcatttcacatgtctttataatcaaagctgtcacataaagtgcattgcattgactgtaataccacctgagacaagacagtttttttactaattttaatttcaaagaaacactttgttcaggcagtagtgagcagaattatcaataacagatttaaagtagtacttaaatttggaaacaacacattaattttacatatcatcttcaaattgaaaatattacaaaatattttaacttcatcctatagattgctattacttatatttctgttttcaccatttcttaaagcaacatctaagtaatacataaatctctagggatatgtgaaaaatcattttcatgctttatatatgttacatcaaacccacctatacacaaattcaagaataatagcaattgtgtaatgttacaaaatatttctcaggtaacatgagctcacctattgagaacaccaagctaattcactggttcatgagcaccctcccaaaccacaaattggaacacaaagagaagcaagaagatggatgtttggaactattggaaaatgataattcatactgcaagaatatactgccaccatatctgcaagacaggacaagttcattaatttattctttctcttacttctcctaagctgtatccatctccaagaacaaaagtagctaatactattgacggatcaactataatatacttgggacatacttatactaaaaatattattcatcgttgatctgaaatttcaatttaattgggtatcccttgtttttatttgtcaataatagacccacagtctttcatggcatttggactgttatcttttgctttgaggagcagaagacagaggtggagaagcattttcctgaatggtgttagtcgctacagtggatattttaacatctcaaggtgcctttgcctgtgcccaatgctgggtccccgaagtcagaagtgctcatctgttctttaaggcagggtcactttctgccaccacagggagcagtcattatgcatactcctgttgccagctgtcagtaaaccaatgccgttctcttttcttttattatttcattcatacacatccattgtgtacacaccatgagccaagcactttggaaggcacttctggtgagaaggaagaagtcaggacaccacagatatgagtgagaaggaggctaccgtcccggcacagtggcttacgcctataatcccagcactttgggaggccaaggcaggcaggtcacttgaggtcaggcttttgagaccagcctagccaacatggtgaaaccccgtctctatcaaaaaacaaatacaaaaattagccgggcatggtggcacgcacctgtagtcccagctacttgggaggctgaggcatgagaactgcttgaacccgggaggcaaaggttgcagtgagcctagattgtgccactgcactccagcttgggtgacagagcgaaacttcagctcaaaataaaaaggagcctaccacacaattgttgacagtctatcatagagagtaaggacatcagccaaaggtggtctgcagagatcagacaggggtcatctcaaaagggaacagccttaatttcaccttagatgtagacgggtttgacagaaaaacaggaaaacaaaagaccgtgaatgtcccattggaagacatactaggaaactgtcatggggcaaaattcatacgtcttagagataaaagttggtaaagcacaattgaagctatttcttattaaagcacaattgaagttatttcttgttttcttcagtaatagaaaagttggacatttttctttaaagaaatcaaatgcaattatcctgtacagactcagtaactctagccaaggatcaggttagtcgctttcatggagcgggagtttcggcagctctattgttctagcattagtaatgcgtgagacctacccctgaacacttccagttagggaagctctgcagagatcttgcactgtgccacggatggcctcgtgcttttggcaataaagctggaaatgcaaaacacgttttgtggttcaaataatctccaggagacagtttcctggaagttttaaatcctatttctcataccacctccatctaaattgatgatttctatgaccttttcatctaattacactagtatgttgtacctatttttattaaatggttccattacataagccattatgtgctagctccttcttgttgctaacctcatgagcccaccccattacttctcttcactttcacatcaaggatagcattcctcaagatgaaatttgttatgttatcttagatctatctaagattttcacaaatcacttcactaacacttaaatatcagagacagacacccagaattctaccaaaatcgttgtgtaccctcacatgaagtggtgtatagactggttgacaagacaaggaaaaaatggaaagcactaaaaagcaggaagaaaatacacaacactccagagaagacattaggaaaatttttaaatgggtaaaaactgggaaaaggatggagagtggctggagaatgccctctcgtgccaacagtcattaaaagacacagcagaagacgccatcatgggcagcacaaatcagcccccatcccgcttttgaatcatagagaagtttgcaatgtcaaacaatatccttctaatatgttatgagaattctatcagaccctagctaaaggtagaaatgaacagatatttatgagaacagcatcagggagagaacgtggagaactgcatcactacgtagttgtacaagtgaattgtctaatacaatgattagagtattcctttccgctagtttctaccccaccatatttattgtatctgagttctaaactatttttattttattccctcctgtccaatacttggcattcacctaagcagtcaggaacatctgctgtatttgtgacaactattcagaaggtataaaacaaagttatatgcagcatgtagcagtgacatttgattgcaagggagagaatccaactagaaatgttgactcactgtgttaccaagcatcgtgaaaagaggctgacgttagccggcggtaggccagtaataatatgcttacaccatattaattgcagataaaccaaattgcattgctaatttcatttgcatttgcattatcattgtgttttaattactagagttaggccaccaaagactaatatccaaatctgacagcaccaattccctggatacattttgtggttgctgaatgattattgttcaacagtttgctgcttttgacaaacgcaaagcaacataggcttcccagccctgaaagaatgaaggaatcaatgaaagaatatcaggcgtggactgatgcagagttccattctggctccaggcatacggtccttgctcaaagataaaacaggcatgtttcccaggaccttccctgttaatgtgtgctgtttgaaaagaggtcagggtcaactaggtatgggaaataccaggctaaacaaacatgggccttattgcagaccttcttagagcctttaatatgttattgtacattgtgactctcagagagggaatagagtttgcagtgttccctaacacttacttgaccatctagtcctttttctcactgcaaatcttctggatttcccaggaatgcgcttttgaaaaagctgaatttgcataatataactgtaaccagaaccatgggcattccataaaagtaaacataagttatatgctagaaacattctactgtacttaacagaaactcacagtcaccagtccacaatatccagataaccctcctgtctacattgtaagtctaatgttcccaggatttctgcaaattactggggactttcattctcctggacacttctggccaaaagccccaggttccagtgagctaggaatctatggaacatctcttcttccagtgcacactatctccttccaacccatgttaagccaagtatgcaatcctcctccattcccagacttccacgaaaaccgagcaactaaataaacaaatcctttcatgaggcttgctcaattctgcagagcatttggaggttatactgcagcaatgcaagcaacctgaaattgtgtatcagacacacttgtgctctcttctttcaacgctttattgaaatataatttatgtatcataaaattcacctgtctaaagtagacaactgagtggttgttagtatatttacaacgttgaaacactcctgttcttaacttcctctataatttctgactgattataggctccagttttcttcctctctttctctgtatctctgtaaccctcaaattcaatttctttttttttttaatttccataggtttttggggaacaggtggtgattggttacctgagtaagttctttagtggtgatttgtgagatttggtgcacccatcaccgagtatatatatgcctttgcaccctcaaaggcatgtatatacacacacgtgtgtatacacacatatacacgtatgtgtatatatataatgacaataaggcaaacaattgacactatttgagaagcaaggttaacaaagacacgcacatgcacacacacacatatatgcctttgagagtgcaaaggcataagaatgacacaatgaatggacttgggggaaagggtgagaggggagtgagggataacagactacacattgactatatacatatatctatatgactactactcaaattcaatttctttcttttgcaaccctttggctttcttgtctgcagccaaacccacgccctttgaatcccatctcaactccgaacatcttgcccgggtaactttctaaataaagacagggctcttcctgaaagacattcagatgtcagacattaaaattaaaaaaacaaacaagacaaaaacaaaaataagaataaggacttcctcgcactggcctctcccctatggaagcctctccatgacttcaaccaaatcacttctggcttctgcgttggcagtccaatgccctgcagggagtccctgattgctgctgcccttgctcatccttgatgcaggtggtcatttcacccctccctccctttgtgagtgtctttacatagtgctcctgaccagaatgcagcaatatagctgcttctcactgcctgccactgctcagtgcatcccttctacctagttatgcccttcagatcaagtttccataagaccacaacagaaagcctggttcagactccacagtgacatcattccggcctctattccaacatgcagggaagatgccatccatcattcaagcatgagtaaccaattccatagaggaggcaagttcagtgtttctgtttggttaaagccacggccatctcaacagccatggcccaaacatttttaaacaaagtagggaaggaggaaaagaaatcagaggagaaatagtaatgggattcaggatgctgcacaatgggctttggacaggccaggtcagatgtggggtggaggtaagaggagagcctcaaacctcttcaacagccacagaagctaaagaaagcacaggaagacctatccttcagccccctccctagggatttccactggtggtgagtaaacagctcaattacaagatgtaattatgagttcactgttcaggagacacctagaattctttccagaaaggcaactccgccaagattttacccccatgttattaccaccatcatactaagctatccacatttgcatttgacccacaggctccctgtattctgtgtgtgttcaattcctgcatgttctgcagaggccatctaaaactaggttttattcacttcccaccttgcagcatttggtttaaggaacttcagctttcttgtagtttcatcacaaatcttcgtggtttagatcctaggaaaatctcccttcagcactaagatcaaataggtagaagctgtcgacatgcagtaaagcggcattgagaggaagccaaggtggtgtgaaggagttcctggtaagtccacagtgtatgtacatcatagccttacttctcagaaaatgacaataaggcaaataattgacactatttgagaagcaaagttaaccaagacacgggagttggaaaggcgcctgcacggatactgctggccccccacaataattccatatttgacgggcacacggcagtccagaaaacaagcacattttcttctttgcagctgggtggctgatttgcaaatgggcctttatatctccaaataatgaaataaacatgtgtttggattttaaggtgatgccatactgttataaaacattctaagtgcttgactctcaatttctgagcttatcttggagcagatggtcccatagaatgtgaagggaagaaatgtataaaacttacaagtcatgccccaaaaggggagcccatgttcttctcccttgctccatgttctcccttgctccttcacactccccttcttgttgactagaaagcagcttggccatgagccactgtggaccacgcaagtgtgaccaacatgctaggatgatggacaaacaagacagaaggatcttgggctccactgacttcactgagcaaatctgccataccagcttgaccttttgcacttctatctggtttgggagactgttacactggtcacaagggcaaacctatattcttagcaatatgtgaactctggatcaaactatttcagggggtatctgtacagacatggatgtctgagcatacacaccagcactaaaagtatatcaaagtccaaactgactctatgtctcaacatttgggcaacacacttttgaaatcctgattggtttggtaccttagtaaaaacagagtgagaaattgactgtctttctctcaatgtggggacaggccaatgtctgccctgagctctgccagccatttcacaaagatacacctcagtcataaaaacatatgtgattatatgtatcctagaaaacaatgttcagtaataaagtggcataaaggagcatatgttttttagggatttagaaggaatttcataataatgcttatataaaatagtgaagcaaatttagagaaaacagcacctttgcaaatgtttccaccactggcacactgaccattgacaagattcaaaaatgtgttagattcagactggacaaacattgaagttaatttaaaagcattttttgtttttggtatttcaaaacagtgagctgttttaaaaaaagtctttaaaaaagaaccctattacatcgacaatttaataagctcattcgtttacaactggttttttttttaatccccaatgtgttttttttaagtgatatctcatttattttaagcctggaagagagttttctctgcatttgagcagtccaggatggagctactaaaagaaaggtctgtgaacagtgagatccaggaactatttgtaaccagtctgcatcaatataagcacagacactggaagttcagtgcttagaaagttttacagcaatataatatcaccatgacatccaaatgcatgactgactttctaatcattagttttcatcgtattttaccaaagcatcagttctcaacagatttgaattttttttaaatggcccttcaccaagatagcaatggtctagtaaccaacttgcagatataaagacccatttacaaatttgcctgcagctttctatgcctccaatcacacacaattgacatcaaaacttcttacatacacaagcacattgcacgagctagtgcccacaacaaaaacaaagcgagaacttattcacatcttattgccacctgaccatacagcaagactgtttcaacagacacatttgcaaatcatagttttataataacataagaattgggcagtaattatttttataagagaaaacaacttgtatttgtgtgtgtgcatgagtatgagtatgtgtctccatcatacaaacaataattgcccccatgtcttctccattttgtcttcaattctggttcttaggattttctccaggtgttagtagttacacctctggaaagggtcttttgttaataccaaaagcattttgacttatttctttgggaaaaaaaaaaaaaacaacagaaatgaaagcaagccctcttttaaactggaaagctttattttgcccctggagaaaagcagcctggttaaatgtctgaacttattgttattattattttattgagcaataaactaaagtgtgattgagccaccagtgactcggatatattgttaagcttggaatcacatggttgaatgactagctggcccagaacgtgggcgattcaaatgattcagaagacaaatgaggcaggagcaagaatgtctcacaccaatacaaacccaattaacgtcaacaaaatcctgcaaaatttattgttgcttggcctctgaaaatggtggaaccaactcttttcctgtgcctgcagggcaaattcattagatggaaaacggcattttgttaaccatgaagttcagtaacataaacaagtcagtgccatggtccttgagacacctgcagagggtcaaccgcaaagaagggaaggaagagagagatgctgatcttgctctacaatgcccatgagtagtgacacagtaggtgtttcataaataatgtctttttaaagtcacagtccaggataaaaatgatatatctgattgtcattcagttcgttaaataacgatcatatataaaaagagaaagagagagaagagagaggaagggaggaaaaagagattgatattttgcctgcaagttcaccaaaggctaccatgttggtttgtgcttgtttttttgtttcagtttcttaagtaagagtgattcacttgtgctgattcaacttgaaccatgtttacatcagatgctcttatgcccacaattgacaaatctaagagtggtcatgaaacaaaacggacctcactggccccaaagtcatcgaatctacaattttgacctttaggctatgtgcccacagaactggacgacactgctgaattcatgtaaccctaagcgctgtgaaacgctccatcactgtgctatttgacagcaaggatggcgccacttctgagataactcatgccgcagagctcaacaacataccccttgttcaaagtagagatgatgggcgttgaaagggccatgacacagaggtcttttgtgtgatcagacttactctgtgtggggtaataggagtgtcgtctgaagagtggtttggctggataagaccacgaaaaaaaaaaagtaccaaacaatcaaaaagcttaatcatggattatcaagaagaccattttcccacccacatttgattctgaattcaatcaaacccttaatgactcatatgaggatttcagggtgttctatcaaaaatctgctgaaatagacccaaaacacagcaaaatattaaggtgaaatattatcagtaccagaaaaagtatctccaatactttttctcagttttcagtttcttatgattatgatgatgattcatttctgctgattcaacttgaaccatattcatatcagatgctcttatgcacacagttaacaaatctaagagtgatcatgaaacaaaacggaattcagaaagcaggaaagtatctccagtactttttctcttataaagaacataccatttgttgggtaagctactgatgctagatgcagcccactatggaagcaggaaaagaatctacttagtcactgaatcaacacttaccatgtgcctggcatggtgcaaggctcatgcagcagaatttatttcttcatgcttttattttgtttccatctttaatagtgatcagagctatgaagaagatcttggagggtaatgaaacagaatcacagaagggaattttgtttcattcagaactgggaacagcctatttgagggagggcagtcacgtgagatttaaaagatagtgtttgagctcctgtgactcccagtgtcttttaactttgtatttttactgagacccacaaaagaaattcataggtgactgctggtcctggatttttagggacaaccaagattgacatgtgattaattttctgaagacaactagattctggccatgacaaggggcttctgggatgaaaagctaggaccacagagggccagggggggaagtgggaatgagaccaaaaacaccaatagaaccaagaatcagtgaggacagagcaagggagaaaggagggtcagagagcaggcaacatggcctccaagaagttcaggtgcagaatgaaggacatcgggggaatatctgtccattaacctgcctggagccctcttcgtattctcctagacacccgaaactattctgcagcgtttttctttgctgatttagacgttacaaaaaatgtagtttcactgctgatttttctccagaccatttgtgcattcttgctctgaacaccccaatccataatcattgtcagctgagaccaaactagctgctaaactacttaccaatgtattcagtctccacggcatcgatcccagcagaaatgcaaatcagcttttccagggcgaacctccctcctgaagaagtgagtctaggccagcaactgccgcctggaggaatcctgaagtgccccccagatgtgtagggtcttggttgtcacacagtgcatttgacacatcacagtcaggggtccgtaatctgctgcctccagcagtaagataatgatgttgtagtttctcttctcttcctcttgcccactagaatttacttggatcctagcgaataaagatgggagaagggatatcagtcctgcccatcacctgctagcatctaccaccattttgggatagctgggctctacagctgtgtagacgacaaggtgcataccagtgccacataagccatgtttcaggaccaaccaatggtcagggcacacagtgtaaagtgagagagaggaaccaaggctggagggctcagggcacatgccccaaaactacagacactaaagggattggagccctgttaaataaagtgaaccctcttttccacaatttatttctctatcagccttggcaattgtccccacgacaagaaggagcctagctggggccactctgcaaattcatgaggcaggggagacatccaagctgggcatatgcatgattattacaggaagaggaaaacatctgagctatttagcatctcacagttcaaatggggcgattgctgagacactggtgtggaagagacaaatggggtggggaaatttttctaatcttaataaaatctttttgctttttccagtaagtaaaggagtgagtgatgacgtgtctgacccttctttaatatcatcaactggagcgagaaagacctgaaagaaaatatttagaaaaagagtgttcatattatgccttgcctgtgctatgccttaataaattctctcattagcaataagccaattctatataaacaatgttttctcagcaggcaacagcaagttcataagtactcttaacactcattaaagctcacatgcttcaagaacatgcttagaaatattgtgggtttcctggctctcggcacatatttcaatggggaataaatgggtgcatggaatacagtgaagagcaagttccttcaacaagttctgtcttttcttgccactgctcagtaacaaaggaagcagtgagcaaaacaattatttgggctttaaatggaaacaggaaaagaccagacatctaaaattggagaaaatgtacatgtcagaggctaattcagaattttttaaatgactttttttgttattctgggaagatgttttaagtttttattgtaaacaaatgtcacttttgaggcagatggaaaagtaatctaaatttagaaaatgtgtcattattaattgaccttagttatcagagaaagtttttttcaaagatctgctaacttcaactccaaactggacacaactgcctcctgtaacttacttcctttaacgcctcaatcaactacagtaactcgcatttgagattgattttatttgcctttaaccaaaacttgttagaaacagcctgcacaattatttctctttcctcatcctatttctttttggtacttctgtggggaaatgtgaccagtgtttgcaaaacaacacaagaaacacctctcaattgttttctggcattattaacttgttattgttaccagcaactctgcatctccacaactatcaatagtttattgcttgtttctttacttagattcattgacattaatagggtgaaatgtaatgacttacggtcagcattttggaataataaaaatgattaatttggaagttctttgcaatattctatacagttcaaaagccaacatctaaaaatgtatactgcatggagagaaataacaatttagtttcaattataaattaaatacatgtaaactccttaaatcattcttataattggcaactataaatcagttaccaggatctttcaagaatatttaaagccatatagtatagaaatgttttctattgattaaaaatagatgtagatagagattccatactagatgcttactcacatctgcatttacctactttttctttctcttatgaagcaaaactgtttttacaaaataggattgttactcccaggctcccctaatgactcattatgatcaaaatgacaaacttagtagctttaactttaattggtttggtacaatcaatgctttaagttggtaagtagattcacttctccatatatttcacatgttaaaaggttacttttatttttaataaaaataaaataattgtcagttttaataaaattacttcctttttccttttcaacttctgctttccttctttcatttgatgttatgtacacttccagtgttgccaacactttacagtttcaacgccttactgtgaacatgcttatttttaatttgaagcaaattgaaacacattttaagagttgaaagttcacatcctcctttcaaaaaaactcagtgcacttcagtgtgtcacaaactcagagctgattaccactgagttagaggtcaaattatttgtatccaaattaggatttctcatctttctttctaaaaattgtctgtattctcaagtttttaataggaaaaaaaatcttatttttatgattctgtttctgacaataatttttgagacaaagggatactttggctcaaaaattattttaagaataagaaaatcaagctctagtacacataattcctcatgtggcaaacaagaaaaatataatactgaattaaccaacaattaactcattaacaatcttcctttgttcagtgtctgctatgttgttattagaaatccagaaaagcaagtctattgaatagaatttttaagaaaaaaagttaagttttatattctactctgagatgttctggctgtactgtcacctgtcctaactgaaacaagggtatttaacatcacttttaatataaatacatttcattgacatttaagttattatcaagccgctgaagggcctaagagttgatattcctttacttcaaaagagaacattcccagtgacgatgtacccagcaaccacattcatgtggttttgatttttactcctccttgtctttataatttttactttgatttctttcatatggacacagaatgacttagcagtgtgactttttttctaattcattcaatcggccattctaaatctctcgttaagcatctgatatatagtcatgtagtttatttaagtaactaggcagtagcgcaggacacagactgaaattaatcccagctgcgtcgctacttagctgagtgaccttgactttgaccttgcttaacctcaattacctcacctgaaaatggggacaataatgatgattatataggattattcagaaggtgacatgagataaacataattaaagcacattgccctgtgcctagcgtattgtaaactctcaagaaatagtagccactatgaaagataaaagtgagttactaaaaagctataaaattatatgaatttaattgtagaacttacaagaaagtcattcattatgtaaaagaaatcttagaatggaaaaaggagcctcaaatattaacatgagttaagacaatagggactgtttcaatatggccagagtaatactgacatggagccagtatactgatatttatgacattaagcccttcttgtcccaccagaattctgggcagctctctgggattgaaataccttctgggacttactaaatgagctaataggccccacagtcaagttacctttgaatccttagttgtgaaaaacttggtgttggagctcccagactgtatagtttagttattgcctcccctattttgctgtagtatttttttctgagttatttgtgctttgttacttcccaatcacatacaactatgtttattgtactcctcccaatggatatgccatgatacagtatttctttactaacaagctttacatcttaaacacttttaaggtacgaattaccaagggaaagaagtactttccactcatttgccttttaccatttaagttttattcttagctatatatcaagtaagagcatttggtacatcccaagccccagaacgggtaatgagttcttttatttatttaaaatatttgctgcatttgtttcaatatcaaataaatcattagtaatttctttagtgttcagtacatatttaaaccaagaagaaaaagaaaaacaagtatgatcatattgtgaggtttacatgataaacagtaaactgaactcttgatttaccgtagaggagtgttatacagaaagcatgatcatccatctccatgcgtaagttttttgaccgttcataagatttgccaagctttcctcacatgattaaggtaagagtcaaattctaatgtaagaaatcatttgttttcacctcaacaattttatcttgacttttatttatggccatgtgaatgtcttccagtccctacatctctcctcaatcagattaaaaaagaaacagagagaaaaagaaaaaaaaaaatccctttcattgcatccccacaaagtaactcatgaagttcatcatctgtgaaggacagaaaaggcaaattaacagtcagaatgaaaagggaacaggcagcatcttgacgtctcacagaagtagttttggatgtgcttcctttcgtggttcccaggcccaagtgaaggttcccaagcaccttcttaagcaagtttcatgttggcaaagtttgttacgagtcatgtttattatgtcagtcgatgtttttaagcctaaacgaaattaatagcatcatgcatggcttacaataaaccctaatgaaacgttcagaactgtttaaaaagctgtagcaggtttttaaggaaattggttgcctgtatttattctttgaattaagtgttaaaggaaaacagaataataatatataaaacccgggtttcctgtaacaacaataattatgataactaacatctgtatatggctttacagtttgcaaagtgctttctcatacattacctcatttagcagagtggaaatgtttaatgatcccagttccaaactgcctttcattaatagtatatatattatattaataagcacatttagaagaaactatcttcataagcactctgctaagtgtgaacaaaggctgataaggagatgctgaaatccgatatcaaccccataaatcaaataaacatcgaataaaatctgtcaaacacttcataacattgtgtgcgtgtcatcaaactcaaggcaaatcctgctgtgtcacctcgaaatgatgaagagaactaaggtgtgagagcatgctgttagaagtttcattaaagccttatttactagttcagaatgaatttacattgatcttttaaactattgctaaccacaagtgcattaaacctaaacagtcttcatttactgagaaataaatgtgtcagcagaaccatgacttttgtccaatgttgttccggcatttaaggcatttaattcacaaaggctcagtgttaagctttttattgcttgttgtgctaaagcatgttcgtttaattgcaaatatatttccttcctgcatcattatcaaaattgttatcttaaggaaatattgtttttaaataatctgctggaaaaccagtgtggtacgtgggcttattcagaataattgtttcctgctacagatgggttagcaattaagcggtaacattgcttaaacaattttaaaaggaggtgaggataaaaggagtcggattgtgctgatctgagttgtaagaagctctggcatttttgtggagtcaacatgcactcgtggctgatttaatcaatacctcactgtttacatttttaaagaactttgttactggttccagggcctgatctaataaataagcaattgcaatgtattgtataattttgtgagatgtgaattatgtcaaaagtcaccttagtctttctgtctttgaaatggagacaaatgtcttgaatttgactttgaccttgaccttttcctatattaacttaggaaaaagacttgaattcaggcttcagatttttaaaatcccagtaacactattatgaggacacccatgctaaagacagaaaattagggacattattttaaataagaaaagaaacagcaatacctgacttcagatactccagggattacatgcatttcttaaaattgtttttcggtagctaaatacaacagacatgaggtttccatttcagtgggtgaaaaactattgacagtactcccactaaacccacactaaataagctgcttcatgttgtccattacatgggactttaaaaaatgctcactaaaagataaatcctttgcctaattgtatttaaattcaagaaaagagcaactctttactgaggagatgagcataaaggcacttttacgagtattcattattcctggagctacttacattgataactagaaagcaaaccacaacaagccaagcttccaatgggaagcaaccaaggtaacccacatttcaatatcactgtccagctaaaaaaaaatcccagaaactgactagatattgttctatgtcaaaagaagtgaggactccttcttgtctctattatgacatggaattgtgtctcagtttatttcaggggagaaataatttaaaaatgaatagcagtgtgagactcaaaatgggtgggcccctgcaggagaccagtgagcaattagccacatcctgcatggccagactgagtgacatggacaacacaaggggacaagtgagagacagagacaggtaaccactccctgccttcatccaccagtctgtgctctcagggaaatgccctctctgccatggggatcggggtgctggcaaggggaagcatggcattccgaaggtacagatgggacccaccccaaacttcaatgatgcatcttaaacctggactgccgtgcagccaggagggcatccgacttgtctagggcattttctcttctttccctgcagagttaatggggccaggggggtccagcaatgggatggaaatggatagcagccattaaataggtacaagaaagggatgtccgtgttgggaagtcggctgcctctctgaatcctttctctcaaagaatgacggtgttaccttgacacgatatggacatcctcccaaggctttgcacgcatgaatcttttaacatgttcttctctcgccgcaaccttttcccgttgtcaccctcctcctctcacaggtccctcatcgttataagtattgcaattctggagcacttgtgtgcccttccagcggcttcggggctcctctctcttcccttaccttcacacacctcccaccactttctttttgagcaaacactacctgtggttttctagcagtttccaccatccatttaggtactccaaagtgttgggttattgttttaaatgccttcttgaaatcaagaccaaattcctttctgaggtcaaagctcagctttattcttggccacagtgacctaatactcagcaatcttctgccctccataaaagcaaatggcatgcactaaattgtgctgcatggtagtaacccttcgctgctccagaactgcagaaatgctcagctgggtttaccttcttttggtctgttcttaccttagcttttataagacaccaagtacagtcacccctcagtatccatatgggattggttccaggaccctgaggattatctgcaaatgctcaaatcccttatacaaaatggcacagtatttgcatataacctacacacatcttctatgcagtcaagtgttacttaacaactgggatgcttctgagggatttatcgttagttggttttgtcaatggatgaacatcacactgtacttacacaaacctagatggtatagcctaccacacaactaagttggatggtacagcctattgctcctaagctacaaacctgtacagcatgctactgtactgaatgctgtaggcaactgtaggaaaatgcttaagtatttgggcatctaagcatacctaaacatagataaagtacagaaaaaataagataacataatcttaagggaccacctttatacatgcagtcagttgttgatcaaaaagtcattatggggtacacgacttcactttaaatcatctctagattacttgtaatgcctaatacaatgtaaatgctatgtaaatacttgttatactatatatttaaatttttaattattttttactacgtcattttttctaaatatttttgatcttcagttgattgaatccatggatacagaacccacaaatatggaaagctgactgtatatgcacttttttaagtttgcattccctgaaaattcagacacattgcttctttatatcaccttctatctaattcttcttttaagaaaatctttgttcaactaaaatgtagggtctcctggagatgttagagggcagaaaaatatctgagtactttcaaaagtacagtaaagtttcattagaaaacctaaaacatcgtatgcattctttttatgaaaggcaatatcgatgctgatgttcaagtttctgtcttgatatcaacacaaaagtcttggactcatagctggcagaataaatcagactggtaaatgtgttttatttagcatacgcagccttatttttttcagtggatttttgactgccacccttaaaaacctgatggcctggccgggcgcggtggctcacgcctgtaatcccagcactttgggaggcagaggcgggcggatcatgaggtcaggagatcgagaccatcctggctaacacagtgaaaccccgcctctactaaaaatacaaaaaattagccgggcgtggtggcgggcgcctgtagtcccagctactcgggaggctgaggcaggagaatggcgtgaacccgggaggcggagcttgcagtgagccgagatcgcgccactgcactccagcctgggcgacagagtgagactccgtctcaaaaaaaaaaaaaaaaacctgatggcctgacaacagcgaccacattcccagagaatgactgagcagtcattgtcctccacagactcaacatgtgctttccaggttttcagaatcctagcccacttatctcaaatacagaacccatgcaacccctcagggtacttttcaatccttcatcaatcaactttttaataaattaatacattatttgatgaaccaaaaaaatacatttttactcataaagggttctaatgttctaatttttcaatgtgcttttgtatacattttcttaattaccccaaccatctcccaatccaacgactatacctatttgctgtttttgatagatgaggaaacagggttggctcctttgcagacctggcatctgacagaaaccatgagcatccatccagggcattgaatgctaacctcattcaagctttccaagtcaagggctgaagagccatgaaccaacccaactgttcacaaacagtgcccttgtcctgaagattatgccgtgtggtttaagcacaagaaactactagcagcagcatctttaaatatttacaagcctctaatatatgtatgtgtttatgttttggtcagtttgtctaattggtgggagcttggtttttataaattcaggatgccttcaatgcatgggctttttattcacatcaagaattagatatagtcccaggtacttgagggctagggcaggagaatagcctgaacccaggagcatgagactgcagtgagctatgatcgtgccactgtttgacaaagtgagactccaactctcttaagcacacatacactgtggaatactatgcagccgtaaaaaaggatgagttaatgtcctttgcagggacaaggatgaagctggaaaccatcattcttagcaaactaacacaagaacagaaaatcaaacaccacatgttctcattcataagtgggagttgaacaataagaacacatggacacagggaggggaacgtcacacactggggcatgttggggggtggggggctaggggagggatagcattagaagaaatacctaatgtagatgacaagtcgataggtgcagcaaaccaccatggcacgtgtatacctatgtaacaaacgtgcatgttctgcacatgtatcccagaacttaaataaaaatatatatatatagagagaaatatagataggcatttttcagctataaccttatccagcctctttacctagtatgaattataataattatagtaaccatttcattaatactgagcagtaagtggaacagatcccactagaaaaaaactaaaagagaagaagaccaaaattatacattataatggcatcatttcaggagcatctgtaaggaataagccattcactaatgagcataaaccatatttatacattaattctcatcttcaatgcactgttctattttttctttcaatattttatttttccctggtcttcctttactcctcagcaggactcactggaaaaggcatgttctttgctaaaacaaggtcaataatattgtcattttcaactgtgctatcattttcacaggtccaagttgaaatgaaatcaattatgagaacaaatagcatagttctatcactaatgaatggatttagcattgtttcccatattcctaccacttaaaatggaagaaacagagcaaatgtggtgtacagaaagctcaaatagtccatgctaatggtggaaatgcttaagtatcatctgtatacagctaatataaaccaaagtggtttattgccacggttttgtgatttatgacccacattatgactttattttgaaatggttgcatgaaatattaatgtgtggtgaaagaacacacaacaaggagtagagatcacattttatcagatgtacgggtgctcagtgatttcttcctcataagacactgagctccaatctcaggatcctatttgttcccttactgtaatcagcccctcataatcaaactttccaaggtgaggcagctctacttttgctcctagattataggttatgtaccgttaatttttaaaaggatggaatagtttataacaaatgtgaataatttatagcaaatgttctcagcattgattagtgtccttttgaaaaagaacgtcttcttgatatgcatcatttctctaatgccttatgaaaagtcagaaaacctgttactgcactgcttaatggacaaatcaagtttaattttaatcatatataatatgaaagataagtccctatgtttttccctgtttggaatttgccaggcattaacactaagcattagctcaaagcaatctaaagagaagttaacaataggagagttgcctctcctttgaaatttacattttatccgggttctacaactcttggatctatggtttctacagttgtttactgtgctgcctcttaggtcattcctcaccccacttcgcaaagctccaatctggggccttgtttaagtaacagattctacaacaacaactttactgcacagtaaatcaatttacactgagttcctaacttcattttaatttgatcaactatatctgatgcataaaaaacagaatatctttttgaatcatcatgaaagttgtttgatttctattgtattgaagtccccaatcataattttattctactcttatgtatttttaaatgtcaattgctataaataaaaataacataaaataatagctaatactgcactttctatgtgcatgatgtacactgtctaagagctttgcatatattaacttactgtattctctcaataacctggaaataagtactgttctaatgcttattatacaaagaggaaactgacgcacagaattggtaagcaacttgccctggtaacaccaccagtagctgcagagctggaatgaagaactgagctggcttgccttcagagtccatgctctaaccactatactaccatttctattgtcctttgcccagaaacatttggtttcaaagttctttgtaaaaaaaaaaaacagaaaatgataaagatcttatgatttgggattgcaggatacaaacctaactttacaaagatccagtgttaataatagatgtgtccttcaatatctatggtcatccaaatggcagaatggctccttccattctctgcaagggctccctgaagcaaatccccctccaaaatcctcccagaatagtaaaatgcaaagcaaagagtactttggtcaagaagagcttgcatataattccaaactaaaccacttcctacctgggtaatccagggactgttattgaacctctctgagccaagatttttatttccaaactgagataataacactcaccagtagtacagttgtaatcattagagataatgtttgtaaagtgtttggcatcaagtaggctttcactatgatatataatagctgttaccactgtttttgttctatcattgttattctttctgcaagcctatcctcggaatgagtcactgcatgaatgcagggaacgcagcctttggtaacattaacccttaagatctttagctaactccccttcccctttctaggagcactcaaacttttcttagaatgtattgagttaaatccatatgcattcttaacctcaaacagccaatgaggaaatctagactagagacactgaaaatgcaggggagggtgtgacggttccacataaatatcactgctaaggaaaagtcctttcagggaaaacacctcactctcacctgtgtggttcgattgtaaatacctgacctccaggattccttgtctgttaatgatgagtctgttcttacttgggtaacggcttcactgaagaaacagaacaaaaagcaggtaggaaagaacacaagaatccctatgatttgggaaaagatgacaaagggaaacagacatgagagagaaaggaagaaagaagagagagggagaaaaactgtcttccagagagaaagcaaatcgatagtagacactctgtggggaataactgtggtagaaatagaatggaaactgagccagggtcatttattgttttgtgcattctgttataggaaagagcatgaataacaaagaaatctgtccacagacatggaacacccccacgacagaacaggccatttccaatgctatgggtttgttttttttttctatttttactttctaaaatgaaatagcacaatacattctaatggctgcttaggtttgtagcttagttgtcactggacaagaggaggaggtctaactgctcctcccaacctcaccggaggtggatgaaaatgcagccctttctctgcctaaaggcatcattctcaaatatgtgatttttaaagttgcctctatctcctaagatacactcatgaggtgagaattgtccctgcttagagcaattatcaaaatgctgcttaatttttttctttatatttatcatgtgtatttatacctttctttttaccctcttgtgtcacagggaccatgaccacttttttctctcttttttttttttcctttttttgagggagggtgtcactctgtcacccagtctggagtgcagtggcatgatctcagctcactgctacctccgcctcctgggttcaggtgattctcctacctcagcctccctagtagctgggattacaggcatgtgccaccacacacggctaattttcgtatttttagtagagatgggatttcaccatgttggccaggctggtctcaaactcctgacctcaggtgatccgcccacctgggcttcccaaaacactgggattacagtcattagccaccacgcccaactcatgaccacttttaaaaaacttttctgcctcctttctctcatttttctgtcccaattttaatcttcccctgagtacagctcagaacccaacccctatgacaggacttcagtctagcaccctgcatctctcctttcaatgacccaattgcctggctgaaatgagtaaatgccataggaatgagatctatatcaataactatcaacgtatgctctatattaaacattcttaaaagccaaaaggactattttgtaggggctaccacactaattagaaggcaagctctttttaaatacaaccgctcatgtatactaaacacaatcactctcgaatactgttacacatactgtggttctagtgttgttgacaagtagattattaagtaaaccagttgattcatggattacccacgcacattaaaaagcggaatttggcaaatgtaaacaagctatttgggcttatcaaagctatgtttagactattgctttttggttattaaaaaaagaaattctctttgtaacaattgtgaatggaagttcattcatgattttggctctctgcttgtctattgttggtagaaaatgtggtacatacataccacggaatactatgcagccatgaaaaggaacaagatcatgtcccatggaactgaaagccatcatcctcagcaaactaacacaggaacagaaaaccgaacaccgcgttttctcactcataagtgggagctgaacaatgagaacacagggagggaaacaacacacactggggcctgttggtgggtgggaggagagaaagcatcaggataaatagctaatgcatgccgggcttaatacctaggtgatgggttgataagagcagcaaaccaccatggcacacgtttacctatgtaacaaacctgcacgtttgcacatgtatcccagaccctaaaagaaaataaaatttaaaaaaaagaaattgacttttgtagaagagaagagttcccaggatatttggaatatcatgcattccagactctgaaaggaattataagttccagtttcaaccaaaattttttccctcaatagttaatttcaaaaaaagaaaaaggtaagatgtgtatgccattctcatgagaagaaaacaagacctaaaacaaacaaacaaaaaaaccagtctaggccctaaaccttatatgaagataaagaaaggtcatcctcaatttcaatttactttatatattctttgagaggtaaccgtgtcttatctccccccaaaattccttttaaaaggaaatttccaaagatgctctattctgtgaataaagcattgtgccacagccgagaggatccagcaatgaacatgagattgcccttgattcataaggtctacaagctagtaaggatagagaacactttaaaataaaaaaaaatagtttttggtatatttatattgtgtatttggtataattgagttttctacattctcatatatgtatttcatattttgaagaatatgcagaaaataatcaagcttccaaataaacatttttttttaagaactgcacaagtgagaatttaggagaacagaagatcagagggctgcacgggctaaactagacaatgagcccatgcaagtaagttaagaggagaagcgggtaagtatgcacctgctttgtctaggtgaccagcaagcatttagcaatagtcttttcaaaacaacagctccttatattgtcaaatctcaagaagtaatatttatggttaaaaaaatctcagacccaacagaaaatccatgagggagatggttttggaaacgcagaattttcagctatgatatccttttataaacaagcagatactttccccaaatataattcaatgcctcagtctacctcctgctgaaaccactaacaccaccactaaagctcgactatatgggaaaatttaggtgtcactttcaaaatatgtcctagcataaaggcaattaaaaaatgtaaagcaccaaagatgcaagagagacataaatgaataaaatatctggcacgaaagttttcaaaagcttgggaatctgattcaaaaaaaaataaaatcagccaagcagtgttagtaagttagccaatcaggtttcaagaaggcagaaagacaaaatcaacatcaccagcatttgacaccgctactgggggaaaaaagggggatggagttcgtttatggcctttttaaaaatgccattacttggacaagagtcataacagagaagcactgcttatttcagttctgttaactgtaaatatcagagccaacacccagaaaaagttcaccattagccaattggttttgcctggccaattggagatggtaataggcctgctatggatgacattctttctgatataagttgtttcttgctttttctccctctctactgtatgtctttaaattctttataacattcctttctcactactattcaattagctttcagatgagtgaggagcacctacacaccaagattgccactgtaccaagtatcatcacaagagttcacaaccagctgcttaaaagtaattggcatcataatgtgcagaaaaaaatacttttctaatggttgcctggaagatttatatcactaaaatgtaattaaaaagtagatttagaaatatactcagcaaccaaaaagattaaatattaatgtgaagtgtaattaataaattatacatctcttgattactaatggcttattgactgtaaaagcataacattatggaatattagggcaaacaaaggcttttggggaatattgttcagcttcaaggatgctgctgctgctgctcttgaatttccagaagaaatcctgatttttgcagagaaaataaaaatttgcctaattatttccattaacattctttactcattctatatgtcactgagtgtgtcgttctttacaaaatgaaaacttggtagtttcctgaatccttttttattgcactaagacaatttctgctgcatgttctactggctatccggttgaaattaagttttacatttaaaagtagttctgaacctcttatacaaaaataaggtgtctaataccattggcagtgacatcagtacagataaatatctggaatgaggtgggtgtgcgatgggtaatgcctgcagggcaatgcagtctgcagaataagacaaaaccatggatagagagagggggctatccagacatcaataaacatatgtaaactgcaatcacctcacactctcttgaaaaattttcaggccaagtgcaggggctcatgcctgtaatttcaacactaggaggccaaggcaggaggatcacttgaccccaggagttcaagtccagcctgagcgatacaatgagatcttgtctctacaattaaaaaaaaaaatagcctggcatggggtcgcatacccgtagtcccagctacttgggaggcggaggcgggaggattgcttgagcccaggaggtggaggctgcagtgaaccatgatcttgccactgcacttgagcctgggcaacagagcaagaccctgtttcaaaaaaaaattcaagatattcatcagaatcttagaatgtgagagttatagaaagtgccttgggggttatgtagcctaccagcttcattttatataagaatttggaattctcttatgcaacgcagtcacatgacttaagatttcaaggatagtcaatggcagaatgggagcaatagctcaggtttcctcacactgatagcaataggaagccaacaaattcttaggcagacagggatgggtccctggtgaaactcgaccttcaagccaaggacagtctgaagccctcaaactaccagttctggacagagtccacagactgcagtgacaacttccattcccattgggtgcaatcagcccctgattggtcccaggccaaggttccgggccaagccttcccttcagcccccagtttgtcccaggccaagctttcacttcagtccccgattgcttctttacactatcgtaccactttctgaatgagacagccctgggaaagggcaggaaaatgccacacacagagcccggacacagtgactacacctaagtgagtgctccgggactgtgggcaaagcacagtcagtcatcctgagtgaacatccagaaatagggacctgatcagtttctcctcttgcttgaagcccgggaggttcccttcttggaaggtgtggggcttgtagagaggaagtcacctttgtctgaagaaaagatatcccttaattgtggtgcatatggccccaggtgcaacatggttaggggagggcacacagcctggattcctgcctcagcctaaccagcacagcctctgcatgatgcagagacaggcaacaggattctggagtccctcctaatctagccctctcctccctccttgcagcctggcttctgtgcctgctccacagggcagcctaacctgcacagcccgccatctgcatgatgcagggacaggcaacaggactctgtcattttgttgcttcttttctttgaccaccaattcagtagctgacaacaacaaaaccacctggaaactatgtggacaaatgaacacggactccaagtctccaaaatacaaactcatttgctcaactctaatagaaattgtatcactggaaattacttttctaattatacataataacataatcaacaaatccttatgacgctatatttctgcaggcaaacaatgttcaatgtcaccagcaagactacttatttaacaaggaaatttttttaactgcttaacaaatcatcagtggtttagaaatttcataaaatttctcatttcaaaaacgagaaaattaaggccttgcggggttaaatcgttatcaagtaatcagtcggctcactgcccagtgtggacactggccaatattatggcaccagcctttgagaaaaggaaacctttttttgaatccatctccctgacctggggtttgggttgggttttatcagcatagggtgacaggcaagttcaatctgattggatcctggatcccatcatggggtatctgttcctaaatcattccctgatcctcggtcagagcgagcgcttaggttcccgctgcagttaaacacctggttcatctgggcatactaaggttatgactttccacctgggagtccacgacaactgaaaaaactcaaaacttctttaagtagaagttgagcctgaagctgaggcagctgtttcagagaggaggaggaggaggagatagcaaatgtcaagggatttccatttctctttcaatgccaacatacttcagggcatcagcctggctgtatctgtaatcaaaaaacagttcttcgcaagtctggatggctctcctgacaaaaacacctatcctgtgatcaccattaaccatcataacttttgcatagcagtttggatttaccgaatgatttgcaaaacgaattttgttacccttgcaggttgcatccaccacaaaatcattgttcaagttgaacagaaagctgcacatgtatttatcacacactttccctcttccgtcagcttagcttcaggaacctcgagtactgtgggcaatttagaaaaagaaaatgccgtttgaaattctgaatttgcaaagtactataagaataatttatagcaatgagtttaaaactcaactttttattgccttctcaccagctgcaaagtgttttgtaccagtgaatttttgcaataatgcagtatggtatatttttcaactttgaataaagaatacttgaaattgaaaaaaaaaattgagtctgatgggtctagtgtgtttataaaatgacttaagatcccacagttattttaaagtaatacattactcaactggtattcattttgatgccattattttattttataaaactagtcatccttgcagaagtgtatctgattaactcttgacaactactttgcctattttattaacagctgcatttaacccacgtgacaggataactaatttctattgtttttgtatttttgcctcctccttccaagatagcagtagagtactgtgttaaatcttgcttcagaagagcttgtttaaaatagttataaagaaagtaaaatacatagaaaaacacgttataattttaaattaaaaaagaaaaaagatgtctactctgaataaattatgcatacatataaggtctgaacaaaaacatgaaaagatgggctctgagtatcaattttaaaaatctttaccagtataacattactcaaacaaaaattaaaatttaatataattaagtacatattccaagacaacaaatggaccttgactgttaattctggaaaagatcccaaatactttgaccagtagtgcctaaaagtataaaatttatcatgtggcattttatcagacatgctgtggttatttaatgagactcacttttgcagtttctgttggtaacacaaacattttggactttcattgtttacatccacaatcccttatgacaacgtcaagatccaaaaatttctggaaactgaaatttttgtgctaattcatctggggacaaatcctgtcctgaagagacatataactattaatagtccttatcccactaatgggactactgatacttttgactatagaaatagtaacaattttgattgtggagcgatgttgcaaaccctgtcagggctgttacagcgtgtgtgatgcgggtatcataggaccttccaaaatcggaaaacctccaaatttcaaacctcggttcaagagatagatgttgggcctgtattctgtcctttttcactgtggaatgtcgtcatcctctaaggaacagcatccaaatccctttgctgtgcttcctcccttgatcacaagccacacataacccaaacttgagcagcatttggtgttaatcacctgaaaacttcccagcaaaatgagtcaaggaaaaccatccttggcactagtggatggtttgttggaaacccacaaagatagactcgggatcgtgggctatagaagtggtgacaagtgaaatctaacatatgctattttaaatactcatctgcctaatatattctggaagctctcaagaatgtaagacactaatatctctaaaatgttttctattttaaaatgaataacagtaagggtctgtgatttggttttgaaagaaaattatttcccagtaatttaagcaccaaaaatatagaacaatatagtattttacatttatgcagaggtgctctggaagcggaaaaataagaacaattaagctttgaatatttcaagttttaaataaattttaatatttggaaaaagaggtcattaaatgttcaaatccatgcggactcatacatatctgttacacaaaagcatcttagtatccaagttgactttttcttgaaataagcagtattttctaccactttataaccaaatcttagtctatgtcttcctgtgtaaattcatcaaatttaccaaatgaacaggcagcacaaagagagccactgaaccctcaatgagtaaaggactccatgggtaagtcatattttgggtaacatattaacactttggagtctgctcaggggctgtttagcatatttaaatcatgaataagaaaatcaacatcaattaatattgtccctgtgcccggaggatacttagcactgtctattggactcatgtggaaacagtcattaactgtctctgttctcaaagggcactttccaaacatacgataacacccatctggttctttccccaaacctcagaaaaccaacagaaaatgtaattttagcaaattaagagactgttttttaatggatactgtacatcagctggcttaaatctgtgtctttgaggtggtagaggaaggactgggagaaataaaggtaagaggcagagaactgatgacaagaacaaagaaagtagcaaaggctggagagaaggctctggttccttgggctgggtgtccacagagtatccccttccccagggcacacagttcatccctgcattcactcattcattcatctctgtgtccccagagcttgttctgtgtcaaacattgtcctgggttctgaggacaacagagggaataaagtaactcttaccctcaaatatacaatggggacagtagtggtccctacatctttgggttatcgtgaagattaaataagccatcagaataaggcccaaagcatatcttacaaggcacaaatgccctgatattttttaataaaaaaactaaaagagtctagtttggaaatggacacatagacattttaagtgcagtgtgatgagggaaaatagaggatacagcagaagcagagaatccaggctgcaggagggaggagaggggaaggttaggaggggctccagaatcctgttgcctgtccctgcatcatgcagccggcagggctgtgcaagttaggctgccctgtcaagcaggcagagaagccaggctgcaggaaggaggagagggctagattaggaggggctccagaatcctgttgcctgtctctgcatcatgcagatggcggggctgtgctggttacgctgccctatggagcaggcagtaacccaggctgcgtgccctcccctaaccatgttgcacctggggccatatgcaccacaattaagggacatcttctcttcagacaaaggtgacttcctctctgcaagccccacgccctccaaaaggggaagctcccaggctttaagcaagaggagaaactgatcaggtccctaattctggatgatcactcgggatgactgactatgctttgcccacagtccaggagcacttacttaggtgtagtcactgtgtccgggctctgtgtgtggcattttcctgccctttcccagggctgtctcagaggttgggagaagggccagactctctagtagactctgacaccacctagaaaagctacctgcataggccccccagtcgggggtgctgagactgcctacttagttgccagcacatccaggtgtgggctagcctgtgggccacgtgtcttcaataaagagggggacactggaaaccggctagtaccacatagggctgaatgcagctgctgctggggttcatgttccatcagttaaagtctagagagaaagagaggagtgcaatcccaaataccccacctggaggtggcagcatgaactccctggcaggtgacataacagggacacagcaggaggcgaaggtcatattcgaggtggtttctgcatctgttgaatgagccttgggagcctgctgtgtgcgaggccctgagccagggccccggggattcaaaagtgaataaaacacagctccagggtgcatattcagctgcagcagacagatgcacaagtacttgaagtaaatggtttgagggatggtgctatcagcatacaagactccacagaggctataaagagagagggaccagctctatatggcagagactcagaaaagggttttctgaaggaagcgagctgtggactaagattgaagctaaggggcaggggtggggtgcagttctaggtggatcctttgccacacaagcaaagagaaagaagctggaaacagcctgcagcctctaggaaattcagggactttagtacaactggaagggggtcaagaggaggctctaccaagacaggaggcaaaagggaggctggtccaggccagagacttgaggcactggaatgccaagtgaaggaatctggtgtcctttgggtaagagtaagcaagggcccctgaacttgggtagtaatagcagatgttgcagaggaaacatcagcaggatttggcaccatattgccaggaagaggtgaagtagcgcagtaggctaaggagggctccaggcaataacaaggatggaagcaataatgccagcaccacacaccagcccttcctgtgcacagaatacacggtcccatccatgcccaggggcttggcactggtagtggcagggctggattgtcactgacgccccaccactggctccactgggccaggctgagctttctgcgtggagggagccggggccaagcgatgtaggtgcaccctggagaaggtgaggggctctagtcccaggctcctttttcgtttcctggcctcccttgtgattgtttccctcccttttaccatcaagtcaccctgcatactccactgtatgaacagatcacacgatctgccttcaaatctgctcttgagaaccccgggcaaacacatactcctccttgccaagaggcttctcagttccatgtccaaacgcacttgctccatcatccaaggcctgtgctctaagagagagatcactgtttttaggtagagttagagctggcagacaatgcccaatacccccaccaattgcttagagcatttatcagtcagggagcaggctgccctggggagtcatctgcatcagctcaggccctgggcctcacaggacctctcacaatgtggtcctccaggcccatggcctcccccaacccatctgtgctaaaggctaactatggcacccctccaagaagggggtcctgagttaaaccccaaactccagagtcccttatcccatctgtttcctcagtccatcccaccccccatcccaaggtcttgctcctccacttttaaacctccaaggaaaccaaaaataactcaatacgtagctcagggcttggggaagctaccttcaataccttagaggattatattggaagtgaaaacaaaacaaagcaaccatgactcaatctctctgccatttataaattacgaaaataaatattcactaattcacagaggtggtgtggatcaacctttggctttgaactttcaaggtttcagaagttcctaaaattgggtaggtctctatgccgtacaaatgattgtttctactgttaaaaagaaagacatgaggataattttttgcccacgaattgggaacctggataatgctgtgatgccatggagtttatttcaattctttagttatgtatataataaagataaattctgaatttacagaaacttgaaaaaaaaaaaaaaaggaaagacattcctggtgcatgttagtcaaacttctgtttcctgagtaaactagggacccttggatgagacttctaattccaaatcctaacaaagtactacataggtaacattggaagttatctagtgcctgtgacctttattttgctcatttatagaaaggggataaatgaaacccacctttcttgtgtgggctcaaaagtgacagcatggatgtaagcattcagtacattgagaagctgggtgcgccccttctttcctaatggatgaaacacacagcatgagaccataaaagccagagtccttgtacattatggtctgaggatttgcctgcttagaaacatcagagaccaaattattcaaaaaaaggaaaagccaaaagcaaggctcaaaatcttacgaagcaaacatcttggggctttaggggatgtcagggttaattcactgcttgctgtccccctggtttactcttcccctcatagaccccgtttatcgaggtcagacctggacaattctctgaagacacagagcagcaaataggagttaagggcagagtgagctgggttcagcagtagggagaggagaatttctcagcattgttttcaagctcaggtgaatgtcaggaaaagaactcacatcatttccaactgggatctaagaattcactgagcaccaactattggctagaagtatgctgaacactctaaatgccttacctgaatctcatctacccctcttagaaagtaggcatttcaaaatcatacttctctaagttcttaaagggaacaacaaagaaatgtgcaatgtgactcaatgacataagccgtggtttaagcctgtctgcgcttttcgagagtaatcatatgtaccattttgtaagccccttgctacgtaccagacactgtgccaggtgctccgtatgtattatttctagtattcctccccagatcctacatgtcagagattattattattcccattttatagataagaaaactgactttcagaaaagtaaagttacttgctcaagcgcacagagcatgtgggatttaaagccagaattcatctttctctctggtctatttcctcaggattaaaggctcacactttaagcactgatgaggcagaatattactgatataactcgtttctgatctatatagactttggaaatatctcagggtagccacttcctggcctacagaacactaattttgttcaggcagtaacatgtcatcctggctgaattatttgttctaggaaaatcatgaaaaccccaattgtcttagccagtgactggtttagtgattgctatgtgactctcttctgaccaaagagatgaaaaaaagcctgttctttacttctgggaaagactttcctccctgaccgagaagacctgtggaagagaaagcccttttgtggcagctcctcctgctatctgtaacactatcatgtgaggacataatggttggagcaggggcagctgtcttgtgtgcatgagtggaaggcagtaggcattgctcatactctaaggatatcggaatgaagaagaaaaactttagaagcttggtgtccttgtaacccctcaagcctaccctgagaccacttccatgatttttgtaacatcagtaagtgttcttacggcttaagccactgtcaacaaattttctattactccaaatgcatcccagctgacatagttataaagtagaatcaaatcataatttatatttattctgaaaatgaaatttgagtgtttttggtggctgagttgctgactctgaatatggctctactcctcaaagtcacctaaaaggactattagtgacttggagatttgaaccaactctaattctttctttgcttctgtaggagaggcaaaacttttcctcaaccctcttaggttctgcagcagaggtttgcaagttcaactaacgaaagccagattagcaggagaaacgcatacagattatatttgatgttaatttttttacatgacacaggggacttcgtagagaagaagtgaaaacctgaaaggaacaggtagaattgagggcttatataccattttaacaaacagtgataaatttgtggagaagtgacacgataaagaggtttgggacaataaattgtgggaaaaggactagaaaatatactggggtaaccaatgaaacaaaagggttattttaggaaggtttatttgtacagactcatcttggtatcatctcgccatctctgatgatacaaatgttatcttcttcctggtaccagaatacctttctcataggaaatttatgccctccttttagggagaaaagtagggggcagatagcccttcccatatctgcttttcttaattgccttcagctcaaaataatcaatatgccaaagcagcatattttggggtgacatattctgatcacttttacttcaaaataaataatatatctatgattttacctatttaaaatataatgtatcttttatatttaaataatttatatttaagttttaaatatagatataattaaaacattaattgtataatattgtcataatattactaaattgcctactaacatttaatcacaatgattactgcattttgcatttaaactttttaaattagtatgtaattattataacttaaccattaaagaaatgcataaagcaaaagtgaaggctatcccagaattaaaatgtactaaaacttcttttactaattataaaatgaatttacattgtatctgatcttcacccatgttgtgtgtatgaatagcttaattcctttcaaatgagcagtattccactacacagacataccagagtgtaattattgattctcctactgataaacacttagattatttccactttgaaactattatgaaaaatgctggtattaacatccttatacatgttttttttagtggaactttttcgttttcatttctctgggctggagagcaagcaaagctaagttgtaaggctggaaaacagaacaatgcttgctgctaagggtggcacaagggggtttctgaggtcatggaaatgctctatgccctgactggtatggtgattgtgcaggtatatacgtttatcaaaacttataaaactttgagccttaatgtgtgtaaattatactctatttataagaatcataaaaaagaaaaaagaaaactgtccaaaaagaatataagattatggtaggtgtagagaaccggcggttggcattccttccagccatgctcttgcatgtcttccaaactgcagatgctggaaagctgagaaccacatttctcagattcccttgaatcaaagggaaggagacagtttgatcttcacccatgttgtgtgtatcaatagtttaattcctttttaatgagcagtattccattgcacagatattggagtcaaactggcttcttcaaactgtataccttcatgtaagatttgaaaggagaagcaaacaggggcagaagtggaggccatcatcccatgaactggaaggcagcagggatctcctgcagttcctctcccataccaatggccagggcagctggacccctggcaaggccaaatcaccatcccagtgtccagttcccagcctcatgcctgctgaggggcagtaagagcagcagcagctacagagagaagctacaagtctagtttgttttgttttgtttttttaaccaggaaccttttggggcatgcataatagttgacagtattatatagtgaatacacatatatctatcacccagattctacaattgttaacatcgtgttagatttgctgtatcatgtatccaccatatattcatccattactcggtcttattttctgattcattgatggtttgtattttaactcagcaattccactggtggcctcccgctcccaatcctgcccaaggtagtggcttctctagaggaccagtgcccagacttgttcttggagtcttcctgggagccagccaggccttccaatgattgtgtaggttcctcattcatcatccctgctacggtttgttatactacaatgcatctttcaaaggctccaagatagttcatgtagaattaggagttaggaggtgatgtccctttaacatgacaagtgtgttgtgttggttcatacatgtttcttagcaagagaagcaggaaaagacgaatcttcagcttggctacaaaatacttcctagttctgtcccaggaaaattaaacatgatcacctacagcagaggtgcccccaaacttgaaggctcttgcaaggggctggttgctctttctcttgtgctaagagcttccatctgcatttcctcaatccacaagacagcattttgcttttttttaatttttcatttttaacattcttgaggctaagtccagtcatcacatttcatgcctccattaccgaactgtccccaaagttacaagcatcatgtttaccaatactgtgggtgcaaagtgatgtaggttttggtggtgtgcactgaacctgtataactgtgttaataattttgaagagcacaaggtttttcaggtatatatatatatatatatatataatgttatagaagaaataactgtattaaatcaatttctggttaaaacagctaaagtaactctgccacctgcaattgaaatccgactgatacagaaataaagtcaagcatcccgccctacccgagatcccagctctatcccagttaataaccatcaaagacagatttttggatcctttcacctaagagactatattgcagatgcctctctatactgggccgcacttatccacattagctgagcagtcactccaacaccagggcaagtagttctccctcattatctggggtttgctgtaatttctttaaacaaccttcctcctcctttcacctatggacacttaggatgtttcaaccattcatcacgaggaatggtacagttggcatctttcaagatactactttacctaagagactgaacatgggttcagggtgcttcctgagagagtgcacatggtttgctgttgtcccacaaaagggatgttctatcacactctcattgagctgatggacatacaagtaccatcaccagccaattttaaattcatttttgtcattggccacttgacggattagaaaaaatggcatcttgtcttaatttgagtttcttaatattgagaagggttgaagagttttttgtttattagccatttacctttttccccctatggattgcttgcttttttattttaaattgatctgtaaatattttatatgtcaatgaaattcactctttgtccaatgtatttgaaaatgtttgggctcaccatttgccttttgattttacttattttttttgtcatgcagaaattttcaactttttagtaactaaaatcaccaatctttcctgttattttacctctgattattatgtcatgtttacaaacttctcaccctttccaaaaatacatacagtctttccctcagtattcttgagggctttggtccaggacctcccacagacaccaaaatagtggatgcccaagtccctgatagaaaaaattgcatagtatctgcatatgacctatgcaatcctcctgtacactttaaattattcctacattatttataatacctcatacaatgtaaatgccatgtaaattgttgttacactgtattgtttagggaacaatgacaagaaaaatgtctgtacttgttcagacacacgcagtttttttttcccagacatttttgatccaaggttggttgaatccacatgtgcaaaacccatagacacggagggctgactgtatatataattatttatttgctagtaatataatgttttttatggttaactctttggtccacctgaaattgttttggtattgagagtggggtttttaatccacatgggtagtaagttggatcgacataatttattgaattatctttaatttatttgtgaatgaatgggctccctatgaatttttagctatttctggaacattctgttcgatccatatgtctgctgttactccaggtccaaatcttttgatagtgtaggtaatataagaaaacattcaatatatggtataaattggctcccctcttaatactctcctcaaatgtcatattttttagaacctgtggtcagaagccagaagcaggcacttctaaggaggagcaaaaagagcaggaatttattctgagcagggtgaccaaatatacatattcaataagctacaggatgagacatgaatatttatgagaagagatacacatgcatgtgcaattgagcttcctgcctctccgtgtgacccatgtacaaaaaatggtggtactagcatgatccgagggtggaatttccagtcctttgaagtctaaacatgaagcagaggacatgcaaacccttactgcacattctttatagattatccagcatcatttcatggttggtgatctcttatcaggcaaaagggaaggagcattgcagctgcttgatgtcagtggtggagtcttttgaaagggcttgtttctgtttagcccttagggaaggaagcctaattttggtgagtgagggagggggctgtattagtcagagttctctagagggacagaactaataggatagatgtatacataaaggggagtttactaaggagtattgactcacacgatcacaaggtgaggtcccacaataagttgtctgcaagctgaggagcaaggaagcctgtctgtcccaaaatctcaaaagtagggaagccgacagtgcagccttcagtctgtgattgaaggtccaagggtcccaacgttgaagaacttggagtcagatgttcaagggcaggaagcatccagcatggcagaaagatgaaggcaggaagactcagccagtcttgtccttccatgttttcctgcctgcttttatcctggctgcgctggcagctgattagatggtgcccacccagattgagggtctgggtctgcttttcccagtccactgactcaaatattagtctcctttggcaacaccctcacagacacacccaggatcaatactttacatcctttaatccaatcaagttgacactcaatattaaccatcatagaggtataatgaggcatgtccaacctcccatcccctcgtggatgagaactcagttttcaaggttactctggagccctcttagccaagagaatatccattcaatcagttgaggggacttcaaattttatttttggtttataggtggaagactcagagcccatcaggaaagcacgaagaaagcaaactaaaaaagagaaggtggtggacacttggaataataaaaaaacaatcttcttagaattgtgtttccttaaactttgggaaagttaaaaaaacaactctctgctttcaaacactaacttgggagaaacaaagtctgactgtctgctggtgacggattatcaacaccaagtgcagtaaacctcattaattttccctaattgggcagaaagttttggaaaagtctgaagtacagaaacaaattcaacttaatttcaagttcatatggtaacaaggatgacagggcctcaggaagggagagagcagaatgtctcagagaattttttaagggtttcaataatagatatttttaagtcattaggaattagaacactccctgattcacagaagcatttaaatacaaaatggttttacatgtgtttagaaacctttgttggcctccaaccttaagaagactaaatatttcccttgtttatacttttaatttgcttggcaaacccttcccccgcttcaagccctaatatataaatgcacttcaccagcattttaaatttatccccgattctgaattagtggacttctcactggccaagattgcatgtttttttccctcaaaatcctcaatacttttatgctcccaggaaatgtacctgtcaatatgtcatgtgcattctctcattttcttaaaagcaggaactaagtttcatttttcaccctggattctaaagcagttggagagcttgaaagtgaagggactgtcagagagggagcaaatacatctaaccatggtgaaaaggtgatgaaagacttgtgcctacatttcctcaatttgttcttaaaataattgttgacacactctgattgaggaccaactcttgattttccaaggcttaggtcacggagattgggaacaaaagacacagttattttaaaacacaaatgtgagcaattagttcccattttttgctcttaatattttcacagatattaataagtagctaagttgacttctttgaatttggtattttgctccttccccctgcccactctcttacaggtatgcagttggacagtgagctagttaagaggaatgacatgaagaaaatttgaaaatatcacccaggctatgtaaggtctatgggcatttctgatagaccaaacaaatcaacagtggatttaaaggggaaaaagatatgtgtgatattgggagggtatcttagtttgttctcacactgctataaagaaatatctgagactgggtaatttataaagaaaagaggtttaactggctaatggttctgccggctgtacaggaatcatagaagcttctgattcttgggaggcctcaggaaacttacaacaatggtggaagccacaggggaaacaaggtactttgcatggccaaaggaggaagaagagagagaaggcagaggtgctacacacttttaaaccacaggatctcataattcccgcactcactatcacgagaatagcacctagaagattgtgctaaaccatgagaaactgctcccacgatccgatcacctcccaccaggccccacctccagcactggggattacaatttgacataggagttgggcagggacacaaatgcaaaccatatcattccatccctggcccctcccaaatgtcatgtccttctcttactgcaacagaggggaggagactaaaactggggagtgtggcagatagcatcagtgttacaacagtgtccccacgcactcacggtccatatcacagtcagacgcgatactctttacctgctatataaacacagacaactcccaacctcctccctcatggaattcacccttacagtgtaccactgggaggctggaggtgctggaaagttaatgtccctggagcagctctcagcccagaatgagtgggagttggaggacaaatactcagcttttctccccttagggcaggacagctctgaaagcatattctaccctattgttcaatgacacatcttgcaaatgagtcactgaccagcctttgttctggactaccttgtcaaggatgtctgtatagaaaaacagctttggaacatagagataatacctccctctggaatgaagagcaggcatgcttactgcccattatatgagacttgggttccctaagtacaaagttcccacccactgattgtgtaagcaaaatctaggccccattgtaccatgaccatgggactaggggggcaaggagaaccaacacagtaatgctcatgctgcctgttgcgctgaaaggaatagaggcctttgtctctgatataatggtctcacaccatctgccagcatccatggcatgtggcaggccaactcattagcttctaagtatggggaagatctcagatccatcacagttcttaactaaactcattgacctcacatcatggaaagcagccaattgcaggatgaaattttaatttggcttacattaaaaaaataattttctaagaaagtttattttaaaactttattatattgctcagataggatcagaattaaaatggaatattttgagaaatggatctcctgtgtctttgtagccacaaaatttgaagttgaaccactcaagtacccagcaagtggcagacataccatgagcaatagagttaatacaatgattatctcagattgtgttgttgtttaaagattcaggagacaagtccagctccccttcctgagaatgaatgcagcctacaggaatgaggaactgtgaacttccggggtatatagtaatgggtatatacacagtgtacataataacagccaaatacaatgagttcataacttttgcttctcacttgtgaccctataggtcaatatttatattttatttgtttatgaatttatttattacagcataaaaaagtctatcttattaagcatatgccttaaaatgatgaatgaaggaaaaacataattaatgatggaaaagagaaaagttgttgagacacgtaatcttttgcaagttgaacgggaagagcaaacacacgtctggcactgggattggcgatgggcttcaagtccgaagcattttcatacttattcataggtgaccagaccatgtgcagaacagaaagacgaagcattaggaggttcatcatctctgcagccccatggaaagcggttacctctatttcacagatcattgaaaacaaatcagatcccagtatggcttaagaaccttggttttgctttcactaaaatttctcatacatggtaataaaaagtatttcagaaaaagctctttctagactacctataaaaaagggcttattttactaccactggtgctctctacacttaaaagtttcccaatcacataaggcacaaagttaggacaacattgaaaaagatagttatgtaagcttcactgcgggcaaaataaacttcacttcgggcacaataagcttcacttcaaatcagagacggaagaaagacccaaagccagggaaataatttcacccttgcttaatatgcttttcagattaatctcagaatgacaccaaaaggccaagataagaaatgcaggcagtgaatacaagcaaagagcatttaatattagaagcttacatattgcgtaagtgataaaatagtatgtattaacaatgttctcaatcaccttaatttttcatcattttgcttgtttgtttaagaactttcagtttcaaacagaaataaaattagttttctcccttgaaaataggatattcattgcctggcctgattttgacatcaatgttgtaagtaatttggacaacaaacatcctcaaacacacagtcgcttactaagtacctgtgccacaccagacattgtgctcgatgttaggaattcaaagaggaataaacagggcctatgcccgtgagagcctgaattctgatagagacattttttcccaagataaaaaaaaatgaatacgtgacttagttttttttttttaataggctctgaaaattggatttttttcccaaattttctgcaaaatggaaacccagggaaaaatgaagacaaggttttattcagcaggttaattacatcttataactatggtagaagcttccaatttccctactggggttggtagaaaatacacatcaaaatctcttacgtccatgtatgttctttaggttacctctcactttagttacttggtttcttgaaaatccttcaaccagaacaatgaaatggtcttaagtctgtgtttgattgggccttgatggggcaatggagcccaaggccaagagcatctgcaaaaaagtgaaaaatgggatcctcatagcccagcctagatcccaaagacagaagatcagctgtggattgaggaccaagcctccactgataatacagcaggttccttggcccatcctgtccttaacactaaagacagagtgtgaagaaccaaataacgttgcaggtatattccacaaactgttctctttcacacaaattattccagggaaagctccctacctcaatttatgacactgatataacctaggaaccaaaacaaggacattaaaagaaaaatttactataggctaataatcaatctatcttatgactagaaatgcaaaaatcctaaataaaatattggtaacctaaatccataagacttaaataaatacatgatggccatgtatgatttatctcagcaatacaggattaggttaacattagaaaaatctccaaatataattcacagcccattacaggagaaaagctatatgatcaccacaatagatgcaaaaaaagcacaaaggcaaaattcaacgtcttgcatggtaacaaaacaagtatcctaaacaagttaagaatggaaagaattcacttaatatgatggatggaatctatccaaattatacaaaatagtcaagaattagaagcattctcctaaaggcaacaaagcaagtcaggaacaaaacgagaatgcctactctagcttcttctatttaacattgtaccagaaggtcaagatgagaagatcacttgagctcatcggttcaagaccagactgggtaatatagggagacttcatctctattaaaaaaaataaaactaaatgacattgttccagagatcctagccagcatgacatggcatggcaaaaaaataattgatataatcatcagaaaggaagaaataaaattgtcattatttgtaggctatatgattatttacttagaaaattcaagagaacctacaacttatcagagcaaagaaatagaggtaaaggaatagctcagatgaactgattagagagattaacaacagaccaacatatgcatgtgcatttcacatatggcagaaggtcatataaaccagtggggaaagaatgaactattcaaaaaatggttctgggttgactgactatccatttggaaaaaaacaactttctttcattccagttacaaaaaaataaattccagatgaatttgaaaaggttttctaaatttaacatttatggaagaaaaatagagatttgttttagaactccaaggcagagaagcatttctaaaccaaggcacagaaatgacacataacaaagaaaagagtgatacacttttttgctatattaaaatttgaaatctctgtgtggcaccataaacagagtgaaatctagaagccaaatactggagaagacgtgagcaacacaaatagctacaaaagagactttctcttaggtcttcttggtcagaaataggtctggggaagcaaggaatagggagagatttgttgaaggacacaaaattatggctagataggagaaataagttctagtgttctatacccctgtaggatgactattgttgacaataatatacagtttcaaataactagaaggaggatattgaatgttaccaacacaaagaaatgataactgtttgagatgatggatatgctaattaccctgatctgatgattatatattatatgcattgaaacatcaccatgtgcctcatggatatgtacaattattatttgtcaattaaaaaataaaataaaataaaataaatgagtctgatgaccatcaatcattgttcatccacaatgaggaagacctgtcttcctttcttagcacattgtctcttcacactttaactaaattgggtcacttttcacaaaaatgaaaggagaaaagtgttggctaaataaacaatctacagcatctggcaaaggcagttcatgggcaattgacaaaacagcaaaccagaatggctgataaacaaatgaaagttgtgaacttcactagtagttggaagaatataatttaagagagagaggggtcaccatacaaccagcatactgaagcattctaaatcatctaataacaccaacttattggggttttatgaagcccatctctgcttgcctgtcttacaagcctctgaaattcaatgtgttcaaaagcgaaccacttcctccaaaccctttcttcttctcaatccagtaaatgctaccaccaagaactcaagggaaagacttgagtcatccttacaactgtcatagcctcaaccctcttatccagtcatcctgacaatatctgtaaaccctctgggtctgactccacacctctagaatccatctccactgcctgggagatgtcatcatcatttcctgcatggataacctttacatccacttaaccagtctttcttcctccttatctcactgcctgccaaccattattcagtgagcagtgcgactgactcttccacaattaaaaacattctatagtctttgctataaagatcaagttgaaatcccaaatgggatggcccttaacaattcgcctgttcctcttacagcctcatctacagtttcccctgtatttcccattcttactgtgttacttttccctaagtataatacactcattagagttatttcagtgaggatctagtagcagtaaattcatctaatatttgtttgaaatcttctcttattttgctttcattctggaatgattgtttattccaggataatggttatttaagcaacaggagtttaatggcctccttctaacttttgtctgagattatcctcacttattaaacaaagtctacttcacaaaagagattcactactctaattaccttctttcctttgtttatttctgaccacaatgatgctcctgcaagaaacccagcaatggggacaacactcatgtctatccagctttgcagggtaatgcaagctcaaaaatattcatgtaccatgtcatcatttaaggcaaagtcagactgttatgcttagcttcctatgatttaaaaaaaatctgtaagtgataaatgtttgagatgatggatatgccacttactctgatctgattacatacagtatatatatcaaaacatcactatgtaccccatgaatatgcataatttattatttgtcaatttaaaaataaaattttaaaaactgtaagttaaatcatgattttaaactttctattttagtcctacatgtaaaagccagacatgagactcaatgttcagaacactgagactaacttattttgtaaaatagatcatttcctatcagctggcaagtttagataaatgcatgttattaattagattacttgtaccctcacattggcataaatgagtaacatgtattcatttctaaaacactaatatttgtgtttacacaaatattacaccaaaaatatgtgtttacacaaatattacaccaaaaatatttgtgtaatacatttattgatttatagcaaagatacaggttaaagttgttttgagttttattgcatcacaaaactattaagttaatgctcagaagagaaagacatgttttgagaaaatagaaaagattccaggagtctattggccaaaaggaaaacatgccaaggagtgacatacacatacagccacatgcctctaagagtgtgtgatatggtttgactgtgtccccacccaaatctcatcttgaaatgtagttcccataatccccacgtcatgggagggacccagtgggaggtaattgaatcatgggggcagttactcccatgttgttctcatgatagtgagtgatggttttataaggggcttccccagtcacctggttctcactcttctccttactgcggcaatgtgaagaaagacctgtttgcttccccttctgccatgattataagtttcctgaggcctccccagccatgctgaactctgagttaattaaacctctttgcgttataaataacccagtcttgggtacatctttattagcaatgtgagaatggactaatacagtgtatgaatttatatcaagtttcctcgagtgaggtagacatacttattttgtgcaagggatatatttgacctaaacatgcataaaacatagatattcacttttaaaccaccaaaaaatattactaattcctcctccttaattggcatttcttttgttattcatatatggaatctaaatctaccatataacccttggcataaattcagtcatatatttgatctcttgaaattcgaatgtgtgtaagaattgtctcaatgtaaaaatgtaagttatttgtaagaactgtctcaatgtaaaaaggctgtaagttatttggtggcaaggacaatgattttcgttgttgttatttgtcattcttttctaattaatagatttgagttccccaaatgccacacttcattttaccaccaggcctttgcatgcagtgtttcccctgcctgaagcagacagttcctgcctctcattctccaagaaattgaacttcaaatatggtaaaaggatattatgagaaactctataccaataaatgtaacgatttaggtgaaataaacacattccttcacaatcacatcttaccaaaactgacacacgaagaaagagaaaatataaacagctccatatttatcttggaaattgaatctgtcaatataaatataaataaaaatataaattttcccacaaagaaaacttcaggttcaaatgacttcacctgtgagctttttcttaatataaagaagaaataatgtcaatattacaagaaccctctagagataagacaaaattcagcttaacctggacactaaaatctgcaagagcattacaagatgaggaattataacaaaattcatttcttagattacaaaattctgagcaaattatttgcaaactgaatctagtaatgtatagaaaaggaaatcacattatgataaatttgaatttatcctaggaatgcaaagttggaataatattagaagatcaattaatatgattaaccacatcaacagattaaagataaaataatcatatagtaaaggtaaatatatatatatatatatatatagagagagagagagagagagagagagagagagagagagagagagagtccttccaatagatgcagaaaaacaattagataaaattcaatgttcattcactttaaaaaaaaaaaaaagacttttaaccaactgggaatagaaagggcccttctgaacctatttaaaaaactatagtaaatatagtacttcatggtaaaacattgaaagattttcttgggaaatcaggaaaaagattcaggtgcattattacttctgtcaacattatagcagatattccagcaagtgacagaaaaagtgcaaagaaaataaataaaaattattatcaaaaaaaacacaacttttattattcccaggttgtatgttatgtatgatttaagcatctacattcatgagtaaatttgggatggaactttcctttctcattcttgttagatctaatatcaagtttataatagctaactttttcaattctatggaatagtttatgtctatattaaccatgtctctcattttctgtgtcctgatgttttgacatctgaggctttgctaagcctggagggactgctcctcccccaatttgtctattcctagagatagtaaacaaggcatccatgagattgcctttcagatgcaaaccaacgaatcgagagcccataacccccaaccactgctgccttggctgggctctcacgctctaggccactatccatctcccctgatcaccccatagctaagcaccaaacaagtagggaagcccctgtgcttcagagcccactgaaattattcaaacttgccacttctaaacctgttcaccctgcctcacccattactttttacagaagccacaaaaggttcttgctgaagtttctccctcttcctctgcctcctgaccaacccctgtgctttcctgtgtggcccacaacagtgtggcatgaccccttctcttgagatctgtgagtaataaagtatctgttcaatggcagtcacctcctaacctgttgaccttgccatacctaaataataataaaaactctatctcaagacaatgtaaaattaaaattatttgtagaacttacctataagttctacaaataacctgaagattttctgcataagaagatttttcatatccgctttttatgtttttagaattatttataattaagtattatttctttctaagacaatagtaagtgatattgttctagtgatatgctgctttagctgccttcctcaagttttatgatggagtatttttgttttctaaatactttaattttccagcattttctttgtttcattttctaaccctttgattttgtaaacatttttttaatttccataattattcctttacactctcgtctgaagaaatctcatccaacaccctgattttaaacaccaactaaaggccaatgatccctaatttcacaccctcagctcctgagctctagatatgtaaatcaaacatcctacttaatatttgcatccaaatgcctaataagtattcacagacttcatggcaagcaacatgcctgatttctattcagaaggtcctttccctcaggctacttctttccaatcacccatttgtcaaaaatgtggagccataatcaatttttcctttctccttcatccttacaacttacaactcacaagtcctgtcacctccagccctacagcatctccctggcctgttcaccctccttccccctccactgtggtcatcctggtctaaacacctgtcacctcttaccaacatacctgccttgcctcccagctagagtccctgcctctccctttaccacacaccactcattctccccacagtgggtagaatcatccagaccctatctctgtcctgtttaaaacctccaagtgtagcccatcaaacccctttaccaacacccattagaactggcccttgtctccctcaccttgcatgatttttctctttgtttttagacttcagccacactgtccttttcattttaatacaaatcctttagggccttttatgcccaaatttctcttggcccagaaggttcttgaccaaacatttttcctttatctgtatctcagataggtcttccctggtcattcagtctaaaatgaactcctttcctgcagtccccaattgttttagagatgggtatattgccaacactggccttgaactcctgggctcaagcaatcctcatgcctcagcctccaaagtagctgggatgacaggcatgggccactgcacctgacctgcatctccttttttcattacatcactgtttattttatattttttctattgtacttattgcaaccccaaattatcttatgtctttttgttgtactttcctataacctgtttccataagagccaaaagtcttgactaatttttcactgctttagcttaggatgatacctggcacacaatagatgctcactataatggcttgaatgaagaattaataaatggacatgagaatatactcatgacgggccgtgacaggtgtttgagaaaatagtttgagaccatgtgctgcagagcctgtgttggttaagggatggtgagaaacaggtgggtgcctaagtactcaacgaaagagtcaggtaggaaggaacatggacactgtcattacctttgacttctccagcctttgagctaagattccttgtcaggctgaaggcttgcagtgcagttgcctcttgtttgaaatttagtcaccagtactgtgagactcaaataagcagtggggaatattgtaataagtgactattctaaactctagggaaatccaaaaacagaattcaagtcttccttaaaagaaaagaggacatcttaggaaatgaggtctttaagataaatatcactaagcatcaatttgggcattatccgaattctgacatcacaagtgaaaacaacttcaactccacttaaagagatgtcagattcaggcagttttacaacaggaaatggaaaaaggttaaggctttaacttgattcagatgtcatttgatatatatacataggaaattaggtcactgaaaataattttttcaatcgagaaatttacagcccagaataaaatgatgttttaatccattttagccagtgttccttatcatttagctggtgatgtgttatcctgcactgactacttaaaagctacaaacaatggaaaattcgaaaaatatcgctatgcttgtttctgctactagcattttaatgacagtaaatttaagctattgagcacagctattttcttgaaaaaaaaaatggtgactgccatccattaagacgtgtgtgaccaagactttgagaccagcctgcgcaacatagcaagaccccatctctacaaaaaaataaaaataaaaattagctgggcatggtggcacatgcctgtagtcccagctacttgggaggctgaatcaggagaattgcctgaggccaggagttcgaggctgcagtgagctatgatcacaccactgcattccagcctgggtgacagagcaagattctgtctataaaaaataaagacttcatgggtgactacagtaatgcaggaaatattcattaatgtcaaagtcactcagtttacgaagcaaactacctctggggaagcaagccaaaaaagtgtggatgaaaccctatatctacgcaagcaatcaagatccaactcaaatatcaccttctatgtgaacacttgctactcctcttaagaaggattatcattcctccctgtttatcaatgtataaatctctattcttatacacacttcattagataataaatcagtctcccacactcaactgtcagcttcttaaaaacagaaaaccttttttaatcaactttgaatccccagctcccaatagtgtcaagcattcaagaaagatttactgaaaaagcaaagtaaacacgtatttaagtgaggatctcctatataacaagtgttgatcattgtctcattagtaataatttttttaatccaatctattcctgcccttaaataccttatgctctggttctgggttctaaaggggagggggcctgctttccatttataaccctgccttcacccacctcactttgtcaggagcataatagcaacctgcctgtattttctctggcacaagttgcttatattccaagtcaacacacacagtcctaataataaagaacaaggaattgtgtcacatcgtctcaaaacttgactactcctaaagtccttttaaaattaaagaaaatgtccatgaaattccaaaccgttttctaacccaagaatctgattcaagtaatgctaaagaacaggcttgcaacattttttaaagaaaggaaaattttaaatatagcatgtgcaagtcactatactaatttacttaggaaatatgtctagtaaagagtggcttctagcataacttatacatttaatatgtccagctataaatcaaaaccactcaccacagagtttttctatagaaattgtcccactccccattaattttgctgaccggaatttcagtggaagattaagcagttaatttttcaagtagtagcacaagctctcttttctcttaatggaagatggtgagagaaaagtgttttccacatttctggcctatatgtggagaagaaacagtctggttttaccaggttgcaaaaataatgctcctatttggataggttttctttatttaccatatccatctgtagaagttgagaattttcttattcaagggaattataaaatatatattttacatgtattttatttatgggaatacatagaaataaatacatattttatatgtattttgtttattatgtatttatatatggggaaaatctgctatactagagatatgtaagtcatgccatcttaattgtgagatatagttgtgatttgaaatattatgttccattttccccacaagaatactcagacctatcacacattgagttttggtatttgctttggataataaggaccctgtaatgatcacactgtgtcacccaaagtgacatacaataaatgggtgttacaacacaaccttcctcttgggagttagttctgttctttaactctgattttataagcagcctcactctactttaactcttttaaaaagctacttaaccaggtatttcccaccaggcagtcttaaagattattgtgagcttgcctacaatataaaattctgtggtagtgttgatagatatttcctaatcccaataatcagcaagtgcctcttaaataccttatgctaaatattatgtcttgtattaatattaatgccaatttttctaaattgttttcctaaatcatgtgacaagcattccaaaaaggatgtcttgcagaaagagaacacagaagtacagcttacaaagaaaataaagaaatacgtagattctgctttcaatttattcaaaatatactgttctttccagttaaagaagaaaatgattacatattccgttatcttgaaataattaaaaggtcatcaattttctgtcacagatgtgatatggtttaattacattctataaatgtattgaccaggccatcaggggaggccgtcttgctgagaggttattatcttaacaacaaagtgatgtccattgagtgggctagaagtatgtatatagagatttgtgtacatgtgtggattcaaaaatgactgaaaaactgggaatgaccgagttggctggaaccaaagacagcatgagatttactcatgttttcctaagataaaataaaatatttattcatagaaatacagaatttgcttacattaataaatttttccctgtgcaagaacttttatccatatcagactaactattgaaactgagcaaagaaaatggcagacaaaaatgcaattaaatagagcatctctcaaagtaatcacattttcaatttcccctattctattttaaaacagttagaagaaacaagtctccacatggattggaaagctaaaggattcgtgctggtatcacccaatcatgtgtctcccccagctaggaaagccctacatacgaagtcgcttggaaaaaacagaaatggtagcttccgccatgcctctacttactccaggattccatccaataagctctactgcaaaaaagacggtggactacaaagtccatgcatcctacgttaggccagcacccacaatggctgctccctgaagctgcacgaatgcaggtatatagttccacttatgtgttgcaagcttcttcctcttgcttatctgatcttatctgatcccagcagattccagcttctgcacacagccatagtgattcccatagtctagggtggcacccatattagagtatattttgaaagctcctagggattattctaaagtgcaataaggttgaaaaccatagcattccatgctgctgactccagcctttccggaatccttatatgcctctccctaagtgagcccctctccaagtgtattttgtttgttccctagtttgcatatcctgctttctgcaacacctttcaaggctgagactgatctttaaatcactacaaacttagcccagccttttgcagaccgtcaatatcctgataaataaataaaggggtaagatgttgaataaatggctccacattactagtcttctgttttctattcagaaaagtgaatatattctcctcctacccacaaagatattggaaaagtaaattgcgtttaaggaacgcattttttcaaacaaatgtatgccatatagagcaatagtattgttaacttctaagaaggtatgttcactttcatgtgatcgaataggaaagctgcagataggatgtttagtaaaaacttttatcaatttactcattcaagcctctctcatgaactcattccttttcaatgtatggctttcagccatcatcctggaagtaacttctataaagtagaattggctgtagcgattttgaattcctctcacagagacagataaatgatgagctaaatttcatttcacttatgaatgagactggaacgtgaagatgtgcacccagagggtcacataaaagattatgtgagaagtcagtcctgctcctagatcctgagctggatcaaactctgaagagcaaaacaaaatcagaaggcactgttgatactaactcagcagccaagtcttgaagacgcaaaacccagactgccccaaaagagagaatactgtataccgtgcttgaagggtactctggctaaccatgctattgccattgggatatggaaaatagcagtattcccttccaattgcagctgtaacaaatgaccacaaatttagtggcaaaaaaaaaaaaaaaaaaaaaacccagaacataaacatcccagagattaattcccttacagtcctagagatcagaagcccaatgtaagtctcaggtagctcacattgagatgtcagcagagctgcctctttctgaaagatccaggggagaattcgttccttgcttctgccagcaactgagggcagcaggcagtcctgagctcctggccacatggctccaatctctgcctccatggtcacacggccttctcctctcttggagtcaagtcttcctttgcctcccccttgcaaggacctttaggattgcattcagggcccgccccgataatccaggataatttctccttctcaagatccttagcttaatcacatctgcaaaatcccaagtccctattgccatgcaaggtaatatacatgggttctcgagattaggtgtagacatctttgacggccattattcagccaattacagacacatcatcagataaaaataaggtgtgccaaaaataactataatacaaggctggaagtaaagatgttctaagagaagtacagatggaaccacgtggaagtgagagagaggatgagtctttcccaccaagaagggtcagggaaagctctgagggctacaggacatcatctggttttgagagactggaagaattcagaaagattaaaactcaaaacattaagtaaaaaaatcgatagtcaatactcacccctcccatgaggcacacacatccaaaataaaacaaaacagctttttaaaaaagaatgatgttgggagaattgtggacttgtcagccggtaaccaacggtgcaaattgatagtaagtaagatgctctaattctggaatcaacagaacaaaataatcaagaaataaggtatcttataaataaaaaataaatataatggatggtttttattttatttttaagaaatatttcaaacgaatgaaaaaggggtaaaccatttcataaacagccttggagtgggcaactgattagtgtgtgtgtgtgtgtgtgtgtgtgtgtgtgtgtgtgtgtatatgcgtgtgtgtgtatatatatacacacacatacgcatatgtatgtatatatacacacacacacgcatatgtatgtatatatacacacacatacgcatatgtatgtatatatacacatacatacgcatatgtatgtatatatacacatacatacgcatatgtatgtatatatacacatacatatatatacacatacatatatatgtatatatgtgtgtatacatatatgtatgtgtgtacatatatgtatatatatgtgtgtgtacacatatgtatatatgtgtgtatatatacacacacatacacacacacatatatgcacacatacatatatttagattagaatcaatcaacaaaattagttccaagggaatttaaaaattaaatgtgaaacatcaacatataagaaatcaagaaaaaatagatatgtttaccatcactggaggaggtacaatttattaaacttagaataaaaacattaacatatttaactgtgttataaatgtaagcttctgttcttccaaaaataaatagaagcaaattaaaaggcattttatttggggggaaatagaggagatattacatagacaaagtactaatattcttaaaaagcttaatcagattgagttttaaaatactgaagcctcaatagataaactggcaaaggatgtgaataggcaatttccaaaaaggaaactctaaacaatcagcaaatgtgtggaaaacactttccttcaccagcaatcaaagaatgacacattaaaataaaaatgaagtaacatttgacctctatcaaattaaccagatatttttttagaaagatcatgatcaccgccactgctgagggcactgtgaaagggtactctacaatattgctaatattttgatataatccttttggaaagcaatttggcaaagagccttacgatgtttattttctccaatgcagtacttacacttttgagaatggagcccaaaataatcctgactattgagaggcattatttttaatagcaaaaaaattcagaagtaatctaaatcccagacaaaaaagtaatagctacacaaatcccatatgttcactccattggttattatttaactttttaaaaattatatttagaaagaatgtgcaaatatggaaaatatatgtcaatgttaaaaagcaagaaaaaatattgtattcataatatttctacttagattttttgtaaaataaatattagaagcacatataagaaaatactgtgttatgtctgtctctagatagtgaaaccatgaatgattatataaatgttacatatgctttttaaattctcattttttaattcaaaggctttcttatccttttgttgtcattgtcaaatgcttacagtatgttacataaagctttatctaaaactaaattttttaaatgaccaaaattaaagtttttccttccataagatgttcaagaaataattttttatttcttttttgtaaataataactgggttttgtatttacttttttgttgctggtatctaataatgcaagaattatagatttgagatttctctcaagagaaaatccagacctctttccttctaagaaaattgttatctgctacagcattttaaatctgcattgattatatcacagccatcataaagtgtttctacttgctcataatagcccccataaactttaagtttcaaataagaaatgatgtggttttgtaaaaaatctaatcatgctttttggcagatgtgtatctcgagataaatgctaagttgatttcacgatttttaaaacactccccaatattaatatcatctatgagtataatcttattagcaattagcttttaaactgtttgttctttgaaggtaacatttgcaaatcatttgaagaaattcatcaaatgactccccactgttggatttggcaaaaatggagtttaaagttgagggaaggggcaaggaatgcaggatctagggatctcgccaatttgggaaccaaaaaccaaaagagaaattcaagaaggaggtgccaaggcatatcctgagtcctggatcctgaatcagggagccagttggtgttgagaacccaatggagcattctgtcctggaaaccagacatggaatacagctgagaatgaggtttgcttgggggattttaagaaaaggaacacacttttgttccctggtgatgtccagtcctgcaccctctcccttctgctgggcaagagccaccccgattgtatcttctaaaagagtgctgtgcagcgaaactttccatcatggtgggaatgatctatatctgtgctgtccaatgaggagccccgagccacctgtggctcaacttggaacatggcttgtgcaactgagaaactgaattgaaggccgtcttggccactgaaggagccccattcccacagagcaggaaggctgccctggtcaaacatgctattgcctttaggatgcaggggagcctttgaatagcttctttcagttctcttgcctggtttctagctgtgctggatcggggggaggctgtggcctcctgatcactatgacatcctaaacaacattaccaggctttacctcaccacaaacacctcaacattctagaagagcaatgaccaccagtgctggaaccaatagccatatgtagctatttaactttaaatttaaataaattaaatttaaataaaattaaaaattcaatttctcagttgcacaagccatatttcaagttgagccacaggtggctcggggctccgcattggacagcacagatacagaccatttccgccataatggaatgtttccctgcacagcactcttgtagaaggtacctggtctagcagatgctgagtgggcctagttttctccttttctaagacacagaaacatagagggtctgacttaaagaacccccacggaagaggcctaagtgctgttagcatttaattaattaattaaaatttgccttcagcctcctgtaagacagaccccctgactgtggtcagcagtcgcacgcagactttgtcattttgcttactgaccacacattctcatggatcaattctaaattggattattgttagttttaaaagcgcctgagcagcagaaagcagccacgatggcaggccaaggggagattgatagcagaataaacagggaaagtgacaagatccgaggctgaattgatcactgtcagcgcgtccgtggtcagctgtctgccctttagtgcccaaagtaaacatcagaataatgtttagacaaacacatttgatttttgaggtaatgggtatgtcaactaatgacaaaccttagaaaggccaaagggatatccatttttcagactttttcaaccattaatcgttgattttggtagcagtgcacttctaggcagagcatagagggaactctggcgtgggtggggaccaggacaaacctccctaggattcacctgaccatcaacattttcctctataataaaattttgttggaagcagagagttcattctttaaaaatggaagcttcactggatgcagaatttcagttgtctaaagaaaatctgcaacaatcttctcaatccttcaaagggacatggtccattagcacccactagaattacatggaccttgcctgttaccaaaaacaaaacaaagcatggaaaattgctttatcagcagcagtttaccattgaggaacttatgctactgttccaaaaataagatatcgttggtgaatcacgggtacccaaaattacaatttgggtacaatttatcattggcggggtcatttttaatgcgatttttttttctttacactaccatccattaactgtgacttgggaggccaatcaggattgatggcaactatactgagagctccaaaattaacatggtttttctgatcgtgtaaggcatttttcttttgcccgcagagatgtggcagatgaaaccagacgggaatggaatgtggtctagaaatcggcttgcctctagaaggagctgagtagtacaactctgcttcccacagaatatcatggtgtgcgggcatttgctttgttcatatcataatcaatcaatctgtttaaataatgccacttagcaaaatgctgggactctctaaagttcctcaagcacagaaatgcaccctggaagtcagagaaatgtgaagaatgtatttgggttgtacctgtaaaacatgtgtagcatgtacacccctcagagaaaatagcatgatgggagagaaagcacaaaaacatatggacggctgtttccttagctgtgtacaatcccagcaaacttactgcggaaggtgggtacgtaggaaataagtgtacatttgaatacatttgcagggtgggtggtgtcggctcaggctgccataacaaaacaccctagactgcatggcgtaaacaacagacagttattttctcagttttggaggctgaaagtccaagattgaggtgccagcactgctgagtttgagttctagtgagggctgtcttcctagcttgtaaacagatatttacttgacgtaggggaaaggagagagtgagatctctctaaagtctcctcttctaaaggcactaattccatcatgaagcccccaccttcatgacctcaatctaaacctttgactttccaaagaccccatctccaaataccatcacattgggagtcaggtcttcagcacatgaattgacagtcagagggacacagttcggcccatattgggaggcacgtggttatcagtttttggaggtggttgttactgatgttcaccaatttccagttcttgtctatttctggtgaagtgctggttacatgtcttcactcccttgaaattcagcttggctatgtgattagtcatggttcatgaaatatgaggtgtgtcacttttggcatttcatgactgttactcagctctcctcccatgtcttcccctgttagcaagccccaaagccccttggggaggtcatgatgtcataaaatgacaatctagttactattgcttcaaaagaactaaatggcgtaaaataatcattgacttatgctcatggaagatggggatctgtagataaatcagggtctgtgagtcctgagtcagcagtagaatatgctgcaattaaaaacttgatgtaagaatattatttggccaaaaagaaaaggaaggtgtactgatccatgccacagcatggatgaatgttgagaacattatgctaagtgaaagaagacaggcccagaaggtcacatattgtatgattctgtttatatgaaataaccagaatagacaaacctatagagacagaaaacagattagggattgccagaagatggagggatggggaacaggaaatgattgattaaaaaatatggggtttctgtttgggatgatgaaaaagttctggaactacatagtggtgattattccacattatacatggacttaatgttactgaattttatatgctacaatggttaaaatggtaaattttacctcaaaaataaaactaatacgatatccaaacatattacagaaaaatagcatacaaaatcaaagaactaacttcctccttacactcagaatttaaggcccttactggattactgggtggagtgtggatctgtcatattaaaaatgactgactgagaaattaaagagcaatagaaataataagaagcctagaaagagatgctgtgccaaaaagtgactagatgtagagtgattaacactggacaagatgcagcaataatattcaaggataggagggtttatctaagattgtttgacctacccatagaggttctattaggataatgacaaaatagtgtttctgcataattccctaccataattcatttaggcaaaaaagtcctatcccagaaccactggggtgcttaatgccaacttttaataaacttggtagatagaaatccattttcattatcttcccaaatttcaatgtgtggtgaaatttgaatctttgtgcaatatcttccccacaaatagggaaagctgacggttttgccatttagaagacagagcatgaattggtgcctatcggagaaggaaggtaaaagatgcctttatctaagtagatggcttatgttatgatgatgtccattccagttactattactgcaaaaaaaactgaacggcataaaataaccattgacttatgctcacagaaaacagggacctactatggcaggttgtcagccagaaccaatgagcagagtggcagctgcgacctgagaggtaattctctgaatgagaaaagccctttatttgggaggaaaactacattgataaggtcaactaacaagctacagccagaatgcatagctaagatgacccagagagtaagggaaaggcccagacaggtacagtcaggctcacttcctagttaaagttgatatttagcatcctaagaatgtattttgtttaggtgtttctaaggtagtcattttgaaattcgtagactagcaggcagtaataatttcataaaccaaactgcccaaatccaatgatgaatatctcatgcacagtggcagcatctcggagtgagggcagacttggaggaaggactggaaaaattccatctggaccactagccttaagcataaaaatataataaatgattcggaaatgactttcacagatagacacatgttgccctatgagcgtcttcaggaatcttcttcagagagggcttattgtacaccatgggttagaattgcaaatcagcatctaaagagggagaaaggggtaaatttaaaaagcagatttccacagagagacacaaaggaagtcaaacaacagggagaaagaaacaaaaatgggaagcgagaaagtgggatcaaaggagggatcaaaggagatgaaaacgagaaagatgccaagagagaaagactcacttcatcctttgaaatgttctgctgcccaatggagtaatgggagattctgtcataggtggacacctaagaggaaaggagggaggacgtggttgccttttcattttgtcctgccccttggcttgttctttctgatccaacacagcggagtctgcttgttcattggccaaatgtcaacaagtcaccataaagggctgccaaggaaaatgaccaggaacacacagcatgcctgagtcactcatctaatctgccccattgatataaattgcacaaaaggacactctgtcatcatgaaaggagaaagatgtgtacttggattatcttgagcttgacccacttaccaaggacttgggaaaccaggagaccagccaagtctccatctcccccagccccagggtgtatcatttatacctccatccactcacctatatctgaatgtccaaatattctgcaaacctttataaataatagaactgtgtggaatgcagtttatactctcaagaagagaggaggtatttttgttgttgttgttgttgtttgtttgtttggctgtttccacgtgttttcaggtctgcaacactcttcagaacaaaatcagtactttctctataatgtgactaggaacctgtcttttccccaggtctcctgcaaaatttctagcaccttcctcacacaagttgcaggaagcatagagctttgaaattataatgatggaaaaggaaatggaaagaaaggcccaacttttagtcttctgggactccagatcatatttatgcgttcaaaatagtaactttctcctagaaaagggggatgtgccaccattctacacactgggtggaccatttcctagctggtgctgcatttgctacaagcccacagggccctggcagaaaccccctctgatttctaccactgtcctttttaaatgcagcaacagccaaaatctacactctccctgcattgcatctgtttcatttgcatcccaggtttctgcaataaagcaaacccccaatttattaatttttttgaaaagataacgtaagtctaagaaggttaccaagtgtcttcagctaaccaaaaatttaaagaccagcaaggatttagaattccctatactagacccctgatcagtaatcaggtggcgtattgtttgtttgtccatttgtttgtttgttttccaggcatattatgatgtgaggttctttagctacatatgtgcatctccttaagtggtctcagtgatttccagttttgcaggatatacctggagctagaatgatgcaaacaaaaattttagatttaaaaaaatattttaaatataaaaaattaaaaataaaccctaaattcagaattttccaagagctaaatgctctgagggccagtcccagctactttccagctgtgtgagctgaggccagttacctaaatttcccgtgcatcagtttcctgcattgacaaacctctggtaaggatttctgccctacatagctcacaataccaaaatgagaaaatgggaaagtgctaagaattataaagcattcaaatatgaggtcttatgactgctaacacagacttctgcccacaataatcactagaagacgtacgggttatgtatgttcaagtcacctataaagtaacaaatcagcaacttcctatccaatccactacatagcttcctcccataacctaaccatgtgtgtgctaatagcctacctacaaatggatttctctctatgacattcaacacccattaatatttatgcagctgtgtccaggttaaaaaataagtcaagccaaggtaagaggcattttttaaaaaattattttataagttaaacagtaaaattgacttttttcccttttggtgtagagttctatatattttaacacagctgtaggttggtataaccaccaccacaatcaggatacagaacagttccatcaccctaaaaaaattccctatgactcttcctttatagttccactctttcccctgccccagctccaaaaaccattgatctgttctctagatctattctgatattttcaaaataggtcagataaattgaattatacagtatacagccttttgaacctgcctttttccattcagcataatgcctttgaaaatcatccaagttatcacatgtatcatctgttcttgtttattgctgaatagtattccatggtatggatataccagtttgtttaatcattcaattgttgaaggacatctggtttatttctagatcttggtaattttaaacacaacagctataaacatttatgtatcagttgttgtgtcatcataagttttcgttactccaggataaaccccaagagtgggattgctattaaacagtgacttgtaaatatcaacatcacattaaacatccagattttattcaagtcatcctcataatataagagactgatatcactattaatcaatgctcaaaaactaatatgccctaacccctttgaaaatttgagttgtttcatctacagccataccactctgaacacaccccatctcatctgaaaatttgagttgttttgatatattttgtggtatttgatttttttgtggtattactattttgcataaatgttaatgaaaaatatcattttaacaattgtaaaaacattgcagtgatgctttcaagagttcttcctattgacttagaaatactcattcaatttcccaaaataaagtaaaatttaaaatctaagtagaaaggaaccaccacatcagagtctgagttaacacaaacttgctctggcataattgaaaaatcactatgctaaactttgtaaagaatacaccaccattcccccaccccccatgaagtacaccctagagtgtttgaagattatattatgagtggcccaaatgcctgtgtttggcatttgttaaacaatcctagaggagctgccatccttggggttctgtgggttcatccatggctgacacctctcatcctgaatcccttgggtctcacaggccctggaacaatctatattctcccggttgaagatgacagcatgtcagtgtacttaaaattcaatttcattcttcctaatctatgcaccattatgcaggtctttgaaatagtctccaaagaaggtaagtctatattgattccattcccttacatagcaactggtgtgtagcaacccatagtataatatgagggggagaaaatattgattctgggaaacttaatattattaaaagacagttgtattaaatctctttcctggatttagctgagcactttttttttcatttttccattttcaaaaaaatcaatgaagctaatactcttgttagttttagagtttctacgacagcagtttcatgtcaccatagaacctacgggaggtttgtaggctcagcactcaaggcttggagtcctctgctgactgatgagcataacatttctctcttcagttattccggccactcagagcgggcaagtagtatttaaattttattttccatggtatctgttttccttggtgtgtaaaagtctcaagatatggcttagccttagttataaacgcctaagtgcatgtgatgaagctcattacacacatgcaattttcagtttgagagaagtctaaagaaataaaatcaacgtggggtggggggaggtttttttgatggaaaacacctgccagttgaaaatcccagaatctgctatttaagattgtaagtcacattttcttttttgaggaccatccaaacttgaggtatttttttctttctttcttttttttttaacaaaaaaaggaacagctgcttctgatttgtgacaagattaaagcattttggaatctctctccagatatctaatttctgatagaatgtctgttgtgtcattatcaaatataacaagactgtaacatggctccagagtcaatgaaccaaacactggaatcttcttctaattatataatataaaactacttataattctgatgccatgaatttggaattcatgattaagatgggttaggcttttgctaagcaagtgttttcttcatagatactgcaaaccatattttaaaaataagatggcaagaataatgctgaaaatatgtgaaaaacaaactatttccaaatccctgaaagaatctagaagccacaattagcatgaaaatatttgtggtgcttttaatggttattttatatctctgtctctggcttctctggagagtggtgctctcagctgccaggagaacaactaagaccacctggatattccagaccccataaatgcatatgctccagactggatttgatttttgtactcctgctaattgttcctgctgttttcccattttcccatcttcactgccatctacaagagaaattcaaaaagcgaccaaagatcgttggcttggtggacacagcttaggaaatttcagtctaatttgcctcctctcccctagaatccagcatgctgcctcctccttgctcgcctggaccatggcaacggcctcctgaagggcttccaaccagtatctcttccccaacctctgcaatcagagggagcctccagaaaaaaaaaaaaaggtgtcaaatgatatggaaaaccaccatgggcttgacaccgcctgttggataaaacagtcatcagcactgagtaccccagcgaggctttacatggagagatgaggaagaagagcccaggcaggcagcaaagaagaaatacctacgtcatacttgggtcatggtaagaagaccaaattggctcgaaaagggattttttataagtgatggttatagaagataacttcaaagaggtgaagggggtccagatcagtgaagacttgaaaggctcagcctgagactttctgactttatccctcatgccatggggagccatagaatgttcataagcagaagaggcagataaaagcacagtccagttggaatcaccaatcactcccccaatagcacacacaccattgaatgtcattaggctactaattatttttcctagtgaccacccccattgtctttcactaagaaaaaacaatttattgacaagtaattctttaggtgcttccctttcacacactttcaatttttaagtaacactttatactggcctaacaaacataaatgacattctagagatttacaatatattagtataatattagtgtacgatttaacgtgttggctctttctccagagatggaaaaaaagcataatacatcatcagattaaatattaacatattaatgaaaagacttcatttctctgaaccaaagaaaacgaaaacaatgatgaagaatgcattaatgagggttttaagcataaatgacagaaattttaatgccacttccaaatatgctaacttacttaaaattagaataaaatgtatcaatacttacagattatcagagtcaccttctatcctgaccagtatgtcacaagcccctaagctgaccagttgtcacttccaagatatctctaaagcagctcaaatttaccatggccaaagctgaatgcattattatcttccccaaatcttctcagtctccgttaagggagtaagtgtccacctgttcccctaagctagaaatgtcataatcctccctgtctcctttttctctccctaaacccctgcattggttccctaatactcatcacttttatctccaaaatgtctgtctgaatcaggctcactcagcattctcaccatcaatgccttaccatcaatcaacctcccaaaagatttcagttgcctcctaaacagtctcttaccaatactccaacagccagctggtctcttctaatctgaacattcctggaatcccctttccccctcctccaccggacaaacctctcttacccttccagcctgaactccaatgtcacttcccttgcattctcatcatctaccacttccttcccaaaagaatgaacagtttcctcctctacattccctctcctatgtgttctttcttgattacaacactcatcccatttctactatgactcaatgcttaagaatctgtgtccttggctgggcttggtggttcacacctgtaatcctagcactttaagaggccaaggcgggcggatcacaaggtcaggagttcgagaacagcctggccaacatggtgaaatcccatctctactaaaaatacaaaaattagccgggcatggtgccgggcacctataatcacagctactcgggaggctgaagcaggagagttgcttgaactcaggaggtggaggttgtggtgagccgagatcgcaccactgcactccagcctgggtgacagagcaagactccatcttgaaaacaaaaaacaaaaaacaaaaacaaaaaaaaaacaatctgtgtcctctgatacatttgtgcatttattggggttcaggaccgtgtgttattcttcttcgagtttctagcgagtgggggttcatgccaccctcaccacactctcctttgagtaaagtgatgcatctcatccaaaatgtcatcatttgcaatttaagcttttaaaattttcatagctgcacatcttgcctcatgtaaattacctttgcccaaccttcttttgtaggtgtttctatttggtcttcttaagaatggaccacttacatgcagaatttggtacaagattttacccctggctggatgcctaaatgacatacagaggaaagggcggatagggtaaaagatctatatgtacttcggcatgtacctcgatagcccacaacccaaccctggcattggcttctagagaaaacagctatgcagagagaaccacctgtgctcccaaagtagagactagaatgttctatgattgataatcatccgtgggcaaaagcaacagcatggcctctgaagcgatcactcctcatgccaagtaaacggctttctcagcccacacctgccctgaactagtcaattaccaacgttgagaaagcaggaaatgaatggctcatgattttaagcatcaataatttaaataaaaaactcataaagagtcatccttcttcctggagtgtaaatgaatgtgattctaagtgtatggtaaagacacaataattgccagcaaattaactcccaatgaagatgcagagggatatctgtctcctttgactcttggacaatttccttccaaagggattttattgtcccacattaggagtgagaactcaactcagtacaggccgtgcttctgtgttgaagaatgatcaccaggcagtcacataggagcagcttcagccagcgacactggtatccccacttggggctgacaaggttatgtactctgcaaccagtgttctgcaaatccagtcatgagttggtccagagttgtttttagataaagagaaggcagttcttctctcacccagatcctctctggcacactgacctttgagaataagaagtgtacatgttttaattctatgctcagcaatgtactgttgtatttagtcagaggctgcataagaataattttctagaactcaaactggtgtcagatctctgttaaattgcaggtggcttccccaccctttttgccttcatcatctctctctagtttgagagtcttctctaccctgaaattttcaccagtctgtttaacacaaagtaactttgtgagacaaccttgttaaaactaaggtattggaggtcctatgtgttatctcctccactggaggagatcgcttaaaaatcatttggaagtttcttttgctgtgcagaagctctttagtttaattagatcccatctgtcaattttggcttttgttgccattgctcttggtgttttagtcatgaagtctttgctgatgcctatgtcctgaatggtattgcctaggttttcttccagggtttttatggttttaggtcttacatgtaagtctttaatccatcttgaattaatttttgtataaggtgtaaggaaggggtgcagtttcagttttctgcatatggctagctagttttcccaacatcacttattaaatagggaatcctttccccgttgcttgtttttgtcaggtttgttaaagatcagatggttgtagatatgtggcgttatgtctgaggcttctgtccttttccatcagtctatctctctgttttggtaccagtaccatgatgttttggttactgcagccttgtagaatagtttgaagtcaagtagcgtgatgcctccagctttgttctttttgcttaggattgtcttcgctatataggctcttttttgattccattagggagttgaacgatgagaacacatggacacagggaggggaacatcacacaccagggcctgtcagtgggtggggggctaggggagagatagcattaggagaaatacctaatgtaggtgacaggttgatgggtgcagcaaaccaccatggcacgtgtatacctatgtaacaaacctgcacgttctgcacatgtatcccagaacctaaagtataattttaaaaatcatctggaaaggatttggtatgtacataccacaatttgtctatccatccataaactggtggacatgaaggactgacccatgggacaacgtaaatgagccttgaaaccatgacattaagtgaaaggagccagacacaaaagacgatgtgctgtatgattccatttatatgaaatgcccagaaaaggctaatccacagagatagatgcagattggttgctaccagggcttagagaaaggggaaatgagaagtgactgctcagtgactatgggatttccttttggggtgatgaaaatgttttggaactacaaaggatgatggtttcacaacattgtgattgtacttaatgccactgacttattcactttaaatgcttgactttaggttattcaaatttcacttcaattttaaaaggtgagggaagtgggggaatctatacttgaccaagtatgagtctctgatggtgaaatttcagaagtagtgggaatagaaaagaagtttcctattaagatgctttcacagggtctctaaatcgcaggtatgcctgcctccgatgtttcacctttgttggggcccttctggaaagcccagttagtgcaaagaaaccaagccaggttggcctcagcctttcattggatgtatccaccttgtgtgaagaaaaataaaaagattatataataagcaactaatgctaaccagtattattattattgtcaatattctatgctgaccttctactttctgtggcctaaaattagattgtgtattgtttatgaaactttcacttgggaatgttttttaggttacgtgggttttctgctgctgtggcagcagcaggaccaagccaaggcaaaaggcccagtgttactcacagttggctttatgatttcacccaaggacagggaccaaggcacgcagctgaaaaagcaacattggtttctggtctctgatgacacatgtgtttcttcttcctttctcatgctcccagcaaaacagagtcctacccagtgccttccccaaggagaccctggttgttgagactctagactacagcatctagaagtctgagacttgaaacccatctcactcaattcctgttgggtctctgatatgaacatcagcccttctcagggcaggaatttgacattgcgaaagggaaaaataaagaaatgagctttgggcatgtacagtttttctgtcctgctttttttaaatttgagaagaagtatgttcaacattgtctttctacaataaaaccagaaacatggcatatctctcagggtccagtcaggaggcagccatcactccagctattttaacaaggaaaatgtaacacaaataactgttaactattaaaggtggttaactactgatatagtctgtctgggtccccacccaaatcccatctcgaattatagctcccataatctccacaagtcataggaggaacccagtgagaggtaactgaatcatggggtgggtttttcttgtgctgttcttgtgatagtgaataagtctcatgagatctgatggttttataaatggcagttcccctgcacaagctctcttgcctgccaccacgtaagatgcaccttttcttctcctttaccttccgccatgattgtaaggcctccccagccatatggaattgtaagtccattaagcctctttttctttacaaattacccagtcttaggaatttctttttctttttttttcctgttttcttttttttttttgtgatggagtcttgctctgttgcccaggctggagtgcagtggcgcgatcttggctcactgcaacctccgcctctcgggttcaagtgactctcctgcctcagcttcccaaacagccaggattacaggcacccaccaccacacccggctaatttttgtatttttagtagagatggggtttcaccatcttggtcaggctggtcttgaactcctgaccttgtgatccacccaactcggcctcccaaagtgctggaattacaggtgtgagccactgcacccggccctcgggtatttctttatagcggtatgaaaagggactaatacaactactaaaaggaactttaaaaggaccttaaggaagcagcaaaagagcagctattacctctaggctgaaggacagtgaaaaattaaaggaaccaaggatgggcagagggaccttctacctccactgaggctgaggttcagatctcttcagagatttttgccaaatgttattcttgttcatgccaagcctgccttgtgggaatgaataagacagatcaccattcctgtcccttattactgatcagttagattgcatggcagaaaggtcagtatcctcggtgtctgcaaagtggttctttccccctgcatcgtgagggagggcaccacacaactgtaagagttgaactccaaggagaagactcttggtaaactcattattagagacttttatttaaaagtttttttgcttttttttttgccaaatatttttttgggccaacattttttcctaatttttatttgctgccacaggaactcacaaatggctggtggagaagctttctggaaagcaaaggcacggggtggtctgcagaagcaggccatctcttgttgtaggaggctgtgggcaggaaggagcttctgagaagtgaccagtgctggggagagcatggcctgaggcagagctggggctcaggtgcatgtgccaggtgctactgcattgaatgataataactagccaagtccagaactcagcagggatgttcctggcactacaccactctggcaccctctactgatgacgtttacattcacccagctggctaagaagaaatgtttacagggtccacttccagtatcacaaagcagagcagggaaggatgaatttgaagctgagagacaataaattgacacctgccatagatggggattgccattctccctctgatctcacttccagtgtaggtaaacccttcgcaccagtgagctgttatcagagtgtcttcatccatgaacggaacatggacagcctgcttcacccaactccagctgccagtactcaagggtatttccgggcaggtcaaagaacatcactaaactttctaaatcggtaacagaaatattttcacaatgtcttaggtagaggaaaaaagtcaaaaggaggacgttcgtaaagttaggcgtgctcccttgaactcagttttcttttcctcttgagcactcagacagactttctatcttcctttcacagttaaagtagaccgacatgactgggtctagccaacggaagataaacaaaaataatctatcccacttccaggtctgtcccctagaagacctctggcacgatccctcctgccttctcttttcctggacccaaacactgactgcagagaagatctcaggaaagagcagagcatctaggaaagcagcctgtttctgagtcaccacctggaggagggcctccctgaagagttgcccagctggaaatattctaattggattgtgaggagaggaagcaatagcccttcgtgccctggttctgaaaacgtgattcccagaccagtggcatgagcatcacctggaaacttgtcaaaaatgaaaattctcaggccccacctcagacttaaccagaaactctgggagtgaggggcccagcagttaggtgatttgggtgttctaaagttcaacagtcactgccttattgtgcaaaaacactaaatttggagggttttttccttaaggcacatagacaaccaatcacataaaactcaaactaaaccctcgtcataaaaaccttaaacaaagaacttaataaccacttaaaatgtgtctgcccagtaacagccctttcccaaggcagacctcctccttgcctgggcactagactgcctttgtgggactaacattagccacaagcttagaaattatggtttaggagtcatgcagctgcgggctaccagattctgactctccctaaattgctcctaagatcagtgcttcagatagtttgcagaccctgcacttgatggatcagctggccccacccagatcaataaactggttcatctgatcttgtggctcccactcagggactgactgagtgcaagaagacagctccaactccctatgatttcatcactgaccaatcagcactcctggctcactggcttccccccacccaccaagttattcttaaaaactctgctccctgaatgctcggggagactgatttgagtaataataaaactctggtctcccacaaaaataaataaataaataaataaataggctgggcacgatggctcacccctgtaatcccagcattttgggaggctgaggctggcggatcacttgaggtcaggagttcgagaccagcctgaccaacatggtgaaaccccatctctactaaaaaataccaaaaattagccgggcgtagtggcaggtacctgtaatcttagctacccgggagaccgagacaggagaatcacttgaacctggaaggcagaggttgcagtgagccgagagtgcgccattactccagcctgggcaacaagagcagaactccatctctaaataaataaataaataaataaacaaaatgtgtctgccacctcaccagggattgttgtcatagctccatcatccacaacacccctgaagagtccacacatccacaagacccctgaatagaccaggcagagacagcactggtgttgcagacttcatgcttttcgatgtttcactgttttactgcccatactacctatttcggatctgcacatttgttctaagcctgaatcaagctgattaggttgctataaggttgaaggtttattaacctcagatatcacctgtgacatttgactggaagccagaaaacaagggctgtgttcattaattgagctactttagacaagtgacttaacctgctcacttttattgctttctctgaaaagtcaaataatccccgacagacctgctttaaaatcacctgcaggaaaaaatctcaaaaaagaataagacaatagattgcatttccatatttagagatattccatatgatcgtttttacattcatcaaagtttaaacaacagaaaacaccaagtggttcctcttccactccttacaacagccgtatacaggagactttgaagaaacaaactaagtaaactcatattcaatgtagaactatccaaatgcaaagttttctacttcagttattgacttaaacataacgtcacctctagaaaagtgtgggttgtttaatttctcaaatataaagcccaaatttgaaaaattttctgacaaaaaaataatcatttaaggaaaataggaagaaataggagcatctgatgtcaaagggatatttttagtgagccacgtcggtaaaccagtcctgccaggaatgtggtgcttcaaaggagagtcctagcatttagctccagctccacacaaagccacatcttcagcacttagttcaggagtaattaccatctaactggcactggggtggaaggagaagagaactatattcatcttgtgattaaatggcaattagcaactaagtgccttgcaataatgtggcactcgcgacctcttcacagcagcttcccctgccaataccaccagccttctgggtatcaaagcccagtacatcagggctaggaccccagggaatcccaaggctgacctgcacaccagctaacataggttgggtggaggcacaaattagtggttaagagcatggactctatagccaagctgcctggattccaaacacagctccaccactagcagtctgccaacttggtcaaattacctaaacctttctgatcatcagtgtcatcatctgaaaactgggggaaatagttgtttctaagatgtagcttgattgtgaggcttaagtgagtcaaaaatgcagagcattggctgggcacggtggctcacgtctataatcccagcattttgggaggctgaggcaggcggatcacctgaggtcgggagttcgaaaccagcctgaccaacatggagaaaccccgtctctactaaaaatacaaagttagccaggcatggtgacgcatgcctgtaatcccagctactcgggagcctgaggcaggagagtcgcttgaacccaggaggcggaggttgtggtgagccaagatcgcgccattggactccagcctgggcgacaagagtgaaactccatctcaaaaaaaaaaaaaggcaaagcatttaagagagttcctaatacatggtgaagccccagtcaaaaaaggctaatgtttccctaggcttcagtagcttcccctccacaagcctgggatagattaactcttttctgccaatgcattgtttaatgttaaatataatatttaaatgtattatactgctccaaacaaaaactaaacaaaacaaacatcttttcagtcatgaatcctggttcatcctattcccaagggtccaccttcagctgttccaagttatgaaacaaatagaagcaagttttaggaagccctggacagtaactattgcccaagaataagcctgtggatctggaacagagattgagaagtcccacctctccagcagaagtaaatgtggatggaccaacgtcatgccaaagtgaagacacacgtgatcagctcttgatgatctacaacaaggtagcctcttaggctggcatctcctcttgtcaaagtgattgtgaatttgatgcacaaactatttccaaaattagttttaaaacataagtagaggataaatctgttgcaaaccatagcgcttctttaaggctattcctctgtagcagcaggtgtctatttgctctcccagttcttgcccgactttgctctgtgtcacagaaaccttcattccccacactccttgctctctggcttctaagtagttttggccaatagaaggcaatggtaagactggagagtcttacgctacatagaacaggacccccaacagtgcccacatctcctctgtgagctgagctcccaccagagagcccttcactctgggttctcaactccagccaggcagcccccactctggggcagggcgaccccacactgagcagtcccctagttttgatatctcatccttccattgttcctccagtccaagaggtggcagtagaatattcttattgtgaattactgattgcctcgtggttctctggtggtttctcagctcttacatcacctgtataaccaattccctttattaaattccctctgtttgaaaagcctaggttggatttttgtttcctgaagggttggggtctctgactaataagccattaattgtatttatgtgtcattctccctccatgatttcagtgttaaaagcactggagtaggagtcaggagtcctgagttctggtcccaggtctgcccctaattgactgtgtgaccataagcatgcttctctgtgcctcagtttcctgagctggctcaagcacattcacgggcaagccatttcacattaacagcagaatcaggacaaggtgatccaatctgttttgggggtgagggaagaactgcaggggggcttgggtcattgctgcgtatgtgtttgtatgtcttatatgagcttgtaatttcccagggaactcataggtacataatttcctctgtactcatgattttcaccctaatttttcacatttagaattaaaaagagtttagcacattaacattacaaaataaggactgctgaggctaatactatccctattaataccccaaccaaattagtataaaaacactggataataaacatgaaaatatggtaaattcagggcctcagaaagtagatttgtgttttctttctcttttctaaactagcagttccagtatgactagttatgggccacacaggagcatagccatgtaaaattcccagtgtgctatctgtaacctgatctttttaactttttctaataattaataattttgaataattattatgtgatattaatgtccataacagttgtactattagcctttcattgattttaacccagagttgcaatcagcacatactttttttttggagatgggagctcactctgttgcctaggctgttattgaactcatgggttcaagagatcctcttgcctcaggctcccaagtagctgagattatacatatgcaccatcatgcccagctgcaatcagtacatacttaagtcagttatcaattcatgccctttattgaaagaacatttaaacataagactatttttatatgcatgggtctcagacatcacacacacacacacacacacacacacacacacacacacacaaacatgcgctcaacttggaaaatatttctacaatgaaaactatcataaattctttcttctcaggccacatagtcctaaagttcacccaaaatattctattttcttttaactcctcactgcctcttaaaaaaattgatctcttttatcaaaagcaaaagccaatcctgaactattcacgtgtaccttccatgaccactatggtagcaccaaacacatgtagcgactgggtacttgcaatgtggctgctccaaatagcattgtgccagaaatgtaaaaaatacaccacagtttgcaccctcgatgtgaaaaaagcataaattatatcattaataattttatgttaattgcatattgaaagtataatattttggatatgctgggatatactgttaaaattaatttcatctgtctcttttactacaaaatttaaagttgcatcgcatcacatttctactggacagcactgattctacaagttaaggaaaggaaaaggcacttctaccattctctgcctttttacgagaatcttaatgaagaggagcagtattgatacactgatggggtgggggtgggggaatggcagaacttacaggaaagatggatgtgcctgagttttaacttgctgatacccaaatcaagctttggcctatagagaaaataacaaagacccaattaatagtgctgtacactggaaacattattgtgttaatagcgtgtgctgccttcaaatgtccaagacagaagagcttaaagcattttattcttattgactgaaggctgaaggaagtaaggacctcagaattaaagtttcagagaattgaattggccctttgctcccatatttgatgatcattcaaaaaagtgtacatgtaaaatatgtcttacaaatatacagaaggctaaagctttagtacattcagaggagaatatcatatatatattctacctcacatctaaataattccattcatcatctcaatccatgggcttggcatggaccctggtaacacagtgtgtacttaatgtttgtggaactgaactaaacgcacaacctaacaagctttacaattactgggactcgggatccagtcatgccgtttaaaacaaggaagcaaagacgcagctccagaaattcagaaatacagttgcagaaatttccaaaaacatgccaaagctggctgcgcacggtggcttacgcctgtaatcccagaactttgggaggccgagtcgggcggatcacgaggtcaggagatcgagaccatcttggctaacatggcaaaaacctgtctctattaaaaatacaaaaaattagccgggcatggtggtgggagcctgtagtcccagctactcaggaggctgaggcaggagaatggcaagaacctgggaggcggagcttgcagtgagcggagcttgcagtgagcagagatcgcggcacagaactctagcctgggtgacagagcaagactccgtctcaaaaaaaaaaaaaatgccaaagctattaaaaggatggaaagctgaatcaaacatatttggagagccacagagtgccaccatgcctttctaataactaattaggaccttggttttctgcagggtggtataataaccatttggctagtactttcagggggaaaacgtctcttcaccaccacagtctgtattcctttgcgttcttttgtctaggcattttacacttacaaatatatatatacacatatttaaagagtgtattcttttttccttgaatgaatcatgtgggcactagggtggacctccagggattttgggtggatgagaccaatacaggaattgctaatgtggtttctattgaatgtgatggattcgttaggtagaatcatttgctaaaccaggagtactacatttttactccattcatctttgtcttttggattccagggggtgactctgccgacagtgccactacgagctgaatgagcagccttgcttgaagaaggtggcttcaggaacaaatgttgatattccttgactcttgtgagctcctacatttcagccctggcccctcaccttgaagttactctgaagctacgcttcacacgtgtgctctcattttctcagagaattaaagggatgaactccaaggctttggaagtttcatcttctccctgtcacatagtatgtaacctggatgcaaccatcatggtctttaaaaatcccaggggctgttatttatcaggtgtactaagctgaatagcgacctccaaaaggatatgtttatttccaaacccctcaggacctgtgactgtggccttatttgagaaaagcatttttgcacataattaaggatttcaagatgagatcatcccggatttaggatgggccctaaatctaacgacgggtgtccttataggggaaagacagagggagttttgacactgctatggtttggatatggtttgtctccatggaaactcatgttgaaacttgattcccaatgtggcagtgttgggaggtggggcctagtgggcacatctgggtccccttcccacacaccaaattcccctttgacttccaccatgttatggtgaagctcaaaagccctcaccggaagctgaacagatgtcagagccattctttgaacttcacagcctgcagaaccatgagctaaattaaccttctttctttaaaagtttcccagtcttaggtattcagttaatagcaacacaaaatggattaaaaacagaagctcagttccttttcaagtaggaccagaaaagttgtctagtataattctaacatagcgctggaatccggttcccacctccatccctccaaatacacacacattcacgcacgctccttgtctgtacccatgaacctctagggagttcacctcctcctacaatggcatccacctatgggctcccctgcgagtctttggagagcaagaactgtgttctcaacctccaagtggtcccagcaccaagggccatatccagcacacacaggggcttaatacatgtttgctaagtgaacaaacagaactaatctatgattaaaaatgaactcccagtaatacttgtgtctcagtcctagttctttcctcaagagtctactgattgtgcttctccactgccaacatgacatctgggcgtcgagtccatcatctgacttatatagacttcatcacataggccactgttgagcagaggcacagacagacaagaccatgacgtcttacgtgcatttgcacataccttctttgttcaaactcccactccttcaaacctcaactcaaatgcaaggaccactgggaatcctttctgaatttccctacacaggttttacctccttctctcattgtattatggaaaactcttggcattgaaatctagtacacactcagtaaataatggtcactatggcatttttgttggtggtgaaggaggtagtggtttcaatatgattccctctgcttgaagtatttcccttatttataccaattatcttgatttattgtaatttatttgcatgtcttcttctccctctacactagacgctccaatgggtggaagccaagttttccccttgaaatcatgagtatccattaggcagaagacactgtaataataatagtctcaaagaaaaatatggtttgtgcgtactgtccaccaaaccaggcaacagcagagtttggcctgtgtactaaatccaaccatggtctggctttgcacagtgtgctgagagaattagagagatgttaagagaggaactggaggtggccccacaaaacccaaagcacttactctctggcccgctacagaaaaagtatgctgaactggacactaaacacagaagcatctggcttgtaatttgactgtggctttaatttcttatacgatgacctcacattcgcttacccagaaattctaccaagggctcagaaatggcttggaccctagattgggcctggagagccctgatgggactaatgcatccgcacaccaaagggaggcagttttgtgttttaaaagcatctgctagtacttcagattttaaacatttcctctccagtcattgtaagttgagtctctaatttttaaaacattatgagtcaggaggaaggaggactgtcttcagttgcttgtggggccaagccttcaccaaaaccacttcagaaagcaagttccttaaaaaggaaccagtaaccaggctgagttggtgtaggaagtgaagctgcaaaacaagggtcagaacacagcaccgttcagtcagaaaaaaagatggaaatctgcccaaaccagaaacccaaagtgtaatgtgcatgtatactcacgaggaatgtaactggacaccgctggtgggtctacactgtgttctagggcaagttggttttgttttcctacttagggaaaaatttggtttccatgggccctttaaactggcatagctttgtgtttttgttgctttactgttacttcttttttatgagtaaaacttttctctgataatgactgcatcttcctaaaagcttcttctgagttcttattttcaaagaagccgaatccatcttaatattttcttgccataattgccccaggccaatttcttctaaaggaattaaaaatgcaaatctaatattctaattgcataataggataatcttggcagctagatcaatactatctcccactgtcaataatacggccgggatgtgtgtatgtcagagcccaccggtctcactttatcactggccccatggcccatccacatctataagatgtgacattttattagtggccttccatcaatcaactctaatttgtgcatcagagagatgcgtgttgtcatctcagcatccacgttgccctgggcaccagacaacacagagctgaagcctcatgtttccaaggactaagttaaatggcaggaaaagggtggatgacagctccacaaaggatttcttcctggtggccatccaatgaattaaaaagcaaagaacctacaacaagtcatctcaaagaggaagactccaaaaaataagaatgtggacagctcccaaacctgtcagtgcagctacaaaccattgcaggcagcacaggcctggagtcaggagacctggctgtgaggtccggcttggccattccgtgctgggtcacctaacctctatctgcctcattttcctctcttgtaaagtaagagtgttgacctaggttgttccaacctaaaacttatttgacttcaagcgtagtaaagattgtactctggctggatgtagtggctcacgcttgtaatcccagcattttgggaggccaaggtgggtggatcacaaggtcaagagattgagaccatcctggccaacatggtgaaaccccatctctactaaaaatacaaaaattagctgggcatggtagtgcatgcctgtagtcccggctactctggaggctgaggcaggagaattgcttgaacctgggaggcagaggttgcagtgagccgagattgcaccactgcactccagcctggtgacagagtgagactccgtctcaaaaaaaaaaaaaaaaaaaaaaagattgtactctgagtagcatgggtgaagatgtctgtcagtttgatagcgatcagagacatcgttgatacttctgggcaatttgccaattaacagtagaaacaccataattaacacttatcatccaaactatatttccattaagaagtgtttttccaatagctctccttcgccttttaaatgttcttagccaggcacagtggctgacgcctctaatctcagcactttgggaaactgaggtgggaggagcacttgagccccagagttcgttgagaccagcctgggcaacatggcggaaccctgcttttttttttttttttttttgagacaagtctcgctctgttgcccaggctggagtgcagtggtgcaatctcggctcactgcaacctccgcctcccaggttcaagcaattctctgcctcagcctcccgagtggctgggattataggcacctaccaccacgcccagccaatttttttgtatttttagtagagatggggtttcaccatcttggccaggctggtcttaaactccttcctgaccttgtgatccacccgcctcggcctcccaaagtgctgggattacaggcgtaagccaccgcgcccagccaatcccatttctactaaaactacatacacacaaattagcggggtgtggtggcatgcacctgtagtcccagctacttgtgagactgaggtgggagggtcacttgagcccaggaggtcgaggctgcagtgagccacgattgttccacttgactccagcttgggtgacagagtgagaccctgtctcaaaaaaagtaaatgaaacataaatgttctctctgtagctgaaattatttttcaggtctcagataccatactatttggtttaaaatattttggttcaaaatatttggctcaaaaaatctgcttcaatttacccaccttaaccagaaaaaaaaaaaaaaacttgtataaactgtgtttaaaaaatcataaatgtccttaaatataattaagcaatagggtataacaaaactttaagttcttattaaatatgattttagggaaggctaattttaaagagataatcagaacaaagacttaaattctttgatgaacaaaatacctttccaaatttatgacagcatacaatgtaactcaaaatgcaatttatttgactttggagaaaaatgctctgtatgtattttacttgtaactgtagtaagatttcttgttgatatggttctttgcagtttattcaaataacaattatccactacatgctgggtattgtgtaagaggccttcatatatatttttaaatttggttcttacagtgacattggggattagttaagactggcattattgtccccgaaggagaaaatgaaggctagaaaccagtaagagatgtccccagaaattatcagcaatgtgaaaagtgacagaagactcaaggatgagttaaaaaaaaaagaggggggggcaggaaaaaaaagaaatattcctgaaaacttgaggcaggcaaattttccaagaggggtaagtgaagggtttggagaaagagagggagctggggcagaggaagagatacaagccctctgtgaaatacaaaccagggggcttagtattgatccttgggagaacacaagaactaatcgttgcaggttgatctttgtgagctcggggaggagaaaacggtgactgccaagaggctcttccacagttacccgattgaatctcgtttcctctcctgatagggttatcaggcagggggatcatggatctgaatttcagcgaggcacttgacagagttgctcaggatattcttatagacaagatggagaaatggggatgggagtaggacacagctaagtggatttgcagctggctgaacaaatgcatcaaagtgttgaataatagaatgatgtcagcctggaaggaaaatgagccttgtgctacagggctctgttttgggccctgttctgttcagcaagctgatgggtggcttgaacagaatagtagaaggaatgcctgttaggacagtgaatgacatccgtatgggaggaactgctaacacattaaacaaaagagtcaggatccaaaatgttctcatcctgctagaccaatgacctcaaaccatcgagaagaaatgtaatcggaatgaatgtaaagtcctttaattgattccaaaatcaataacacaaaaaaggatgtgagattcttggcttaggagcagttcatggagcgaagacctagccccctggcaaaacgtgctcccattaacatgttgcagtcactaacaaaacttaagggattttggactgcgttagtaggagcccagcgcctcctccaaaagtagttataattccactacatgatggactggtaaacacccggtttcaggtgaggtgctgcattttaagacaaacagaaaattcagagaagggaaaaaatactagagaagatgtggctttaatacaaggtgagaaacggttcatgtgattggtgacatttagccaaggagaggcaaggtggcaatcttctaatatttggagagctgacataggaagaatgagaaaacaaaatcatcactgctctacatggattaagagttacagaattgtggagtaagtctcagggcaacctaaacatgcagttgccacacaagcaactgagttcccagcactgaggggattcacaggctgggctggtgggagaagcatttcttttcagagtgaaaagttgttttgcctaattctacaggacaaaataatcttgatatgtgcagaagtgttgacaatgaaattgccataagtattgcctgctgattaaatccaacacatatgccttagccaattatgatttcaaggtactttgtatacatagggaaggtgtaacgaaaaagtaaaaataaccacatcacattgtgttccctggaggagcttaaaaatctaaagacatataagtaatttcgtttaaataaaagacaaaataaaatagattattatattttattttaacagattataataaaataaattataataaagaaagagaagccacgcatggtggctcatgcctgtaatctcagaatttcgggacaccgaggctgggatatttcttgaggccaggagtccatgaccagcctaggtaatatagtgagacctcatctctataaaaataataaaaaatttaaaaattagccaggcatggtggcacacacctgtagttccagctacttaggaggctgaggtgggaggattgcctgagcccaggaattcaaagcttcagtgagctatgatggcaccactgcactacagcctgggtgacagagtgagaccctgtctctaaaagaaagaagaaagaaagaaagagctataggataaagaaagggtaagaattaattttaagttgagttagaggctgatcaaagaaggcttcacaaaacaggtagcattcaacctgaatgcatattgggtttccagctcaagcatccaggcagctcaggtacagccctggtgaaactctaaacgtggccaccctgcatcttttcctgtatttagccatttgaacggccatcttgtctgtgctgttatttcaaagagattttgttctctgcccatacctggcaacttgacagtttagatctcctttgcttcctgccttccctgtcaccctcattgttatgagggactagccttcaattcttctgcccgtggtcacctgtagacacagccctggcacaggagtcgcattccatcagttttaccatgtaaggtaacctgatcacaggaaggccattccctcaccattgccgtatttttggttagagcaatgcagaggtcacacgcctctttcaggtctgtctgctacaggtgccaggtgggggtcagttagacacttgaaacaagaaggtggaaagatagggcaggtgtgaagcaggtgggcacttcagagctgggcactcaaccttggggattccttcaggggtgcaattatgttcctctctcctcttgcctagacaaatggcttgtcatccttggtcatgaaaaagacactttacctttcaggcacgagggcacatcccactcagcaagatgagctaagatgataccatctgccaccctccttgagctctcccccttcaattttgtgagtattcctcctagcccttgaggtagtaatccacacagcagtagttgctgacatcaccaggattgacaggtctcggccatcacacaggctcccagcctatggctaagtaacattatcccccaggctgtgtgtctatgcagggcacttcccagacactaccagctgcttagacgtacagttcactcccagtggtttaaaccccaaccaggactcagagattgttgctgcatctctgtctctcctctatcataatgccagctgtggcctcccctgagagccgactatttaaaaattaatcaccatgtttcattccacatagaagctcctgttctatttatttctccttcttcttcagatcctctcctggaaatctgatggaaagagccatatgacttatcattttcttcctctataaagtggtgtgaaaattacacagaaggtcatcaggaggcacttctcctccacccacagaaggagagggggtgtttccaacagtggctaactgttgtaagtctgatgctctttggggcattgactaatggtaagagtaggtggacgtctaagtggcctcaatccttctctcttccatctgtagtcataccctttgcaatatgactttgtgcctcttcccattaagatgtggagtctatttctccataccctgaatctagcttattgttataatttgttttaggcaagagaatgaagtgggagtgaaagtctgccagtttggggcctaggtattaagagtccctgcatgcttctacctcactctcttcgaatgtactcagcctccctgagaacaaacccaggccagcttgctggaggaggagagactgcttggaacagagacctgctatcccatcatactctatccatcattctccatcccagcatagccagcccccagctgactcagaaggtgaatacaaacacatgaatgaagtcacctgagacaagaaaaaccaccaagctaagcctagcccacactgccaacccacagactcatgaatgaaacaaacggctattgttttaagctactctacattggggtggtttgttatgcagtatgatctgatgcaggctccatggtttatcagtataaacttccacatcgccagtttcaaaaaagccaccacctgactcatctcaaacattcagcagggtgatggtgtccccatttttttttccttcacttgatcttctggaaccattttcttgaggctccaggacctaacattgaaactggaaggaaagggtcttgggggatgggttgagttgccatacttttccttttcacaaaagtccttgcaaagcatatttcttttatttcatccttggatggttgccttcaattcctttgtttcataagcttctattctcccaaagagccacgacagcattgatttcaacctatgattgccactgaaatattaaaccctattgatttgaaactcaggattagttgcaagttggatactctgcatattttgaagatgggcaattttatttcttctagttgaagagtaatcacagcctcctggtattcttgttttttgatgtagaacttcaaatctgatttcttatttggttccctaaaattgtgaaatgcactatgttcactaactaatcactttactctttcaaatgaagccttcatacttctgagtgtgccggtgtgaaaatacacattctctccattatctatacattgaatactgtcatgatgattcctccacctccccaaacatcaacaaaaatcttactggctataagtaaagatatcgtattctgagtaggcattcagtagaataacttttcttttactaagcagagtttatcattagtttgatgtctactgaaagcataccactacatctaagactcccattagcttgaagctcaccccagtacatggctactactgaaaatttttgtcctaaaatgccctccaagaatagagcatcggactgctgaaataaaacttctctggataactcaagacgggatctgcaatgggttgtctgaaaaccaagttcatctgaagatgcaaaaggctaaagacgtggcgatcaattgtctcccaattcttaattcatagctgcattaatcataagcctctccaaaataaaaacagttaaacattttgaaacaaaagacatttcaaaaaatgtatacactggcgaacatttttacttaatagacatatatctatagaatagctgtattcaactttaaaagctgttactctagtgtgtactaaatagagcccagaaacacaaggtccccttccctcttgcttcaccagaggtctccccaaaccctgacccacattccttacccctccctagtgttcatccaggagggagcccagtggcagagccagctgtcccagtagcatagcggtaggatggagtgagagtaaggccctgggggaagccgcagccccgcaatcctcagactgtattttcctctgtctcccacaccaccattctatgaccttcctcctccttcacaccaagctttggcattacttctaagataagatgtctagaaagtggagctgcaggggtcccttttgaaatgtaggtgagatgtcctaagaacctattcccaatttattctttgatctatcccttcctttctcaagcagcactcaaaaaaccagtctgacatctgcaagccatggcagacagagatataaacctgtgatcctaagagtattcaagggaagtcctgctgaacttagcctttcccaacaggctcacagataaaaaatgagcaggtgaagagcagacaagcccactcaccgttgtctgtgtagctatcaacttgagcaaattaacaaaatattaaattaaaagtaatggcaaaacccacaattacttttgcaccaacctaataaccattaaattaaagaaagaactcgggactgtaagcagttcatcaaggagtcttacgacattgggttagaaacacaaaatgcttgtatttctctaattacttccccccgccctttgctctgttgagtcttctttttatactccttaatagtgtcctgggtggattccgtacctttctagttgtttaaaatgtgaaagtgataaggcaattaatgaagggccattgcaaaccttcagtctcaatcttgttttcagtcgtacgccctctgtgtagacttgagtaggaccttaaatgctgaagggtggggcagtgaggcaaactctgcttctgcaatgcccactgtctactcccggttgagctcctccagttgataggaaggggccgtgtctctattcacttatgtgacctctgatggcattctctctcagatgattgctgcagctgtactggctggttgacttgcaacttctctgaggggcagcatctaagcactgtctctcttatgggaacaagtttgaattctccagcaggctctgaaggctctgtcatctcccttccctatctccacctactgcacaattctgtgacataggattcctggttctggcttgacctctccaaccccttctccatagctccctttaccaggtgcaaatcccatagccttctactgctaggttccctgtgcccagtgaacatcccgccttgttgggtacgagcaagatgactcaaacccagctgtcattccagggtgtccactgacccacaggaaacccagccatccttgccatgtggttggtatgtgggcttccaacccctacccatcctgctccccgctccatttccctccaataggcaaatcagcaagtctatcacctaagccaatgtccagcttggaaaggcaagactcccttcctttcccccaagggcacccccaatttcttagtactgcttccccaggtatcatcccacttgtcttcatggtgagacttcattataaagacaggaagaggtgatgggtggtggctggtggcagcatttttggttccacgaagttctctgtggtgcagatcttgatgccctctctagaatgtgggcattcttgatggcttttgtttcaagtcaagcctgtatttgctagttatgggacaacctaaagagtctcactaagcttctttgcatttgtttcttaaagcttacatcacagataataacaaacagggtagttaaacaacagaagtttatcctttccaggttctggaggccagaagtctgaaatcaagctgtcggcaggtccatgctccttttgaagtctccaggagatgatccttcattgcctcttgcagcttctggtgaccccagatattctttggtttgcaggtgccacacccacgctctgcccccatcctcacatggcctcttctctttgcctctgtgtcctctccttttctcataagcacacaagtaactgaatagaaggcccaccctaatccaatacgacctcattgtcatccattacatctgcataaactctgtttgtcatttatttggcaataaaagtcatgcagattattggctcagaaaggtgtccctagattcttcaattaccctggacccaggaatacccagcacctcactcctcaggccctgactctccactccctccagctaccatgttgtaggtgcagggaccctgaaggccaccctggctttcacaaccagctcctagcagggggaggagaagccttctcctgtctctgaaaagagaagctatttgttgagacacagtgacattctcagtatattttcccacaaagtcagtgttccattggtcttacatcttctggccctgttggtattacaggacatggctcagctgggctttagttagctgtcctgggatcctgcccttctttctttgagaaagaatattctaatgcccaaaactaacttctaaatgtgccttttcataaggtggggattccctctattactactattggggaaagattttttgtataataaagaaataaacacagacatgtccaacttgacatatcaagccagaggaggtgtattaaaggttgaggagctcatataggaaaactattattcatcatttattcatcattaaatataaattgtcatcaaaaatgttttaatattttttattgtgtatttttaaggtgtacaacaggatgttgatatatacatatgtagtgaaatgattaccacaggtaggcaaattaacgtatcacctttcatagtatatttattcatttttgtcttcagagcatctaaaatatattctcttagcaattgtccagtatatgatacaataattgcctacagtcctcctgccgcacattagctctctctccagacgtattcaccctgcattaactacacgtttgtaccatttgattcacatctccccatttccaccgttctactgtttttatatattcaactttttcttagattcgtcatataagtgaggtcgtatggtatttgtctttctgtacccagcttttttcactgagcacaatgtctcctggttccttgatgcagtcacatatggcaagattgcctttttttattattttaatttttgtggttacacagtaggtgtatatattttatatatttatggagtacatgagatattttgatacaggcatgcaatgcacaattaacacatcatggaaaatggggtatccatcccctcaagtatttatcttttgtgttacaaacaatccaaggttatactttcagttatttttaaatgtacaactaaattattactgactatagtcaccctgttctgctatcaaatactaggtcttattcactctttctattttctttgtactcgttaaccatctccacatccccctaaagattgccttatttttaaaggctgaataatattcttcattcattcatccatcaatggacacttaggctgtttccatattttggctattgtgaattacgatgcaatgaacatgggagtgaagatatctctatgagctcttgatttcatctctttgagtatatacccaggagaggaattgctggatcatatggtagttctatttttaattttttgagtaattccatattgttttccataatagctgtgcgaatttacatttccaccaagagtgtatgagggttcccttttttccacgtcctcatcaacacttgttaccaagtgtctttttgataatatccatcctgataggtgtgaggtgatatctcttcatgattttttgcacttccctggtgttgagcactttttcatctatgtgttagccatttttatgtcttctttgaaaaatttctagtcaggccctttgaccattttaaaatcagattttttttctttgttattgagttgtatgagttccttatatatattggaaatacacacaaaaaattaaaacagtttttacccatcccccaaaatattgataaatatttttgacactatatcaccagctattaaaagtaattatttaagataatgcatcatactcaagaattaaaaatgaaaattgtatttagcagttttttatagcttggagaaatattattgaggctgaattccactgaaatgagataatgtcttacaagtgacatacatataattattaataaatattaatataggacactttttaaaataaatagacgtaagtaaattttcaaaaagcaatcaaagtagaaacacagaacgtgaactttcaggcacaaatagtactttgacatggtctcattctttctgttgacatttggttgtacattattcaaagatgctacagaaagttgctaataactggctgccagagatcaaaaatcttgtctaaagagacaaaaaatattcacacacacaaaaaggtttttaaaatactcaggaacttttaaaagacatctcatcatcaaactgtaaggtccccaatgacaagaagcacatgtgttttattttctaatatacaccactggacacagtgactggcacatagatggcctcaagacattgttctagttgaaaacatttgggcacaaatgataggcaactctttaacctgagcatctgaatttggacatttatttttaaaaagctgacaaagtatataatcaatatttctgatgagaactcagtcctgcttttatatttttcatgtaatcgattttttaacttttaacatttaatacctcaaggctcactgataccttatacacctcagcatcatcataatactagaccagtgtaaatgccaggagcctaaataatccacttttcaattaacttatttagaaagttccaggattgagtgaactaaataaagggagaatttttttcctttttttttttttttttttttttgagacagagtctcactctgtcacccaggctggagtgcagtggtgcgatcttggctcactgcaacctccacctcctgggttcaagcaattctcctgcctcagcctcccgagtagctgtagctgggactacaggcgcacggtgccacgcccggctaattttttgtattttagtaaagacagggtttcattgagttgcccaggctggtagcaaactcctgagctcaggcaatccgcccgactcagcctcccaaagtgctgggattacaggtgtgagccactgcaaggcagaaatatttattcatgatttgcctggcctgtgcagagagctcttctgaactcatgctttgctaggtccttcctacaggacaaaccagactgggcaatggaacactcatctttcctatcttccagcagttgtcaatctattatggccagcgttcagtgagactcctatgacatgaaacttacagcttttttcaccaggaattgactttggtcaatttcagcaaagtgtggggtttagtagaaggaaactcacagaatcaggaggggtcttcaaaagcacaagcccagtcctgggaccctaggaggagatgctggaactttctctcaggcattgtgggatgttgactcatctctggcttgccttctatcacagtgtgataaaagtttccatactcttgagagaatgcggaaaccattcttcaacctataggtaccatcaacctataggtacatgtacttataggtactacagggtcacatgtccacttaccagtgagatagagcccaggaaaaaaaatctctcccacctaagaactcacattgtccctagaagaatgtgctaggagactgagcccaagtcatctgtcatcagggtcaaacaggtgctggtttagggtatacccatgtgcaaaatggacaccgagactagcaatgatgttattactactgctaacatttatcaagtgcttattatgtaccagttgcccttctcatcttaacggctatctattaactcctgtttttcactacgacctgtgaagtaattctttttcaaatggaaacatctgaaatgcagatgttccagaaatatctcacctgagagactctctctgaagaagaccttaaattggttgagcctaggagacagacactgtggttagcagggttctaagatggttctctgctcctctcccgagatgcaatgcctcatataatcccctgcccttgatgtatggaggtctatgactccattttgccagtataactacagagatccctgctggccttgcaggagctaactaccatgctgcaacctacccatggagagggccgtgtgtccgggaatggtgggggcccctcagagctgagggcctgagtcctacaaatgcaacaacctgaattcttccaaccaccagtgggcttggaagaggaccctggtctcagctgagatgggcactgcagccaacactttgattgccacctttgagaccctaagcagagaaccaggtaagccgggtctaggtcccagcaccatgacaactgtgagataataaatatgtattgttttaagccactaagtttggtcagtttgttatacagtaagggaacctagtgtagccactgttaaattaaaatggagactgagcctgaagactccctgagtagacaagccttaactttcatcgactggcaaacataagcaaaactgaattaaagctatttcttgtaaatgcctatattaaagaaaaacagaacttaagcctaaccaatcagaaaaagctaacaaacttataaaaagagggactttctagcgggatagaccaaataaggcaactgtgtaactgtagccaatcaaatgttttctctttgctttacttctgtgttcatcttcaaaagcctcccccatccgagaacggtagctcgcacctgtaatcccagcactttggaaggccaagatgggtggatcacttgaggtcaggagttcgagaccagcctggccaacatgctgaaaccccgtctctatgaaaaataaatcaatgatacaaatattagctgggtgtggtggcatgcgcctgtagtcccagctactaaggaggctgagacaggagaatcacttgaacccaggaggtagaagttgcagtgagcagagatcgtaccactgcactccagcctgggtgacagagcaagacagatggagaaaaagccttctccatcttccctcagtggagctcatgaaccacctctggtttggttgctgtttgctctatgaattgctgtttgctcaataagtgctttaaaattttactgtgcctcagtttacttgcttaatgacaccaacagggacaggacttgcacagagcatgaacatccctgattggatggacagttcctgtggggtgggtcagaggagggaagaacctaccaaaacaggaccaccacacaccctgccaaacaaggggcttattttgcagctaaccaagcctatgggggcaaatctgatccggctcccattgtgccaggaaacctgatatcttctttagcctttgtatagacttaagagcactggagaatgcctccgaaaaatgcacagatgggcagtattgtgtacacttcaggcagatttcaggcccctgaaatttccccttgtgtcctctgcttccatacccaggaacccccactctggatcatgctttcccaaggtggggccatatggtacccaaggaaatgagaagcggttttggggggggaaataaaaatatcttattatttttatgcatgtagcacaaataaacataggatacataaacagatttacagtatatctgtggtgttataatttcatgggagacaagaaaacaatgtcttaaaaagcttaaaacagggagaagataatgaaaaaaggtggagaaacactggtgtagacaataatagttcatggtcaaaacagagagaggctttgagacactgataatactctacgtcttgtcctggctggtggttacatcgatgtgtttgccttctgaaaatccacaagcacatgctaaagatctgtacgctttatgtaaggcacacttcatcaagaggaacgtttagcaacaattggaaaagcagaatccaatgttctgacacttctagctaaagacgctgtcacgctggagtgaaacacacagacgccaggcagatatcgaggctctatctcagttcctccttttcctcgtgtgcgaccttggctaaataacacacttccaagcctcagcgttctcatcgggaaaatgggtttaataatacaatctgcctcaaagggtagtggtgagattaaatgagtttatacatgtagagtacttaggacagtgtgtgaaacagcacacgctacagaagttctgctagttctgctgtcctgatttgttgttgttgttattgttgttgttgttgtttgttgtttgtttgagacagggtttccctctgttgcccaggctggagttcagtggcacaatctcggttcactacaacccctccttcccgggttcaaacaattctcatgcctcagcctcctgagtagctgggattacaggtgcgcaccaccactccaggctaatttttgttatgtttttagtggagacgtggtttcaccatgttggccaggctggtctcgaactcctggcctcaggtgatccaccagcctgagcctcccaaagtgttgggattacaggcatgtgccaccgcacctgcccatcctggttttattgaagctctttctgctttgtcctttctctatcaactttaagtttctgaagaacgggaaaaaccaccagcggttatctttccccagcccacagtgtggtgctctgcaaaagctagatgctcacagtgttgtggttgaagttgtggaatcatttactttcttgtggcattttgatacagttcagaattattgatcttggtttctgggaacaatatggttacatattagatactttcagaccaaattctgttttctcctttaaaaataaggtaaagggtcacagctccccaggcttgacatagacgaatgaccaactgcgagtcaggagcccacggctctccttccatctctgctggccaccggctgagggatctttaataaaaaattatttctcccacacacacaggcctgggttttctcatctggacaatgagacagctggatcagacaacctctaaggttcttcctgtgtggttatatagttaataataatcacaacaataacagcagcaggaacttgacctttaatgtgtgccggacaggagtcagagtgtattactcaccccttcagtccccatgatatatgtgctctcattatccccattttacaggtggagaaactgaggcagagtgccccccccccccccgctggtaaatgacagaaccaatatctggctccagagcctgtgttcttaaccattaccaggtactgccacctccaagttcataaagacataaaacataaattattcacatacttcccctagcaagcagtgtatacagccagcaccctcaggcctctgtgacactgtccctcaattcacctttcaagaagcaactctgcatccactatttcctgaaacttctctcagtcagcaccaacagccacaccccctacttttgcatgcatcccaatctggggctctaggtgatagtcacagtgttttgtgttggtccctgttattttattgaattgtcccatctccccaagtaaatgactacccttctgaggtcagagactatcttcatatattgatatcctccttcaggagcacatagtagaattcaataaatattacaaccagagcaccacttgcatttacatatacagtcatctctcggattccaagggaaattagttccaggacaccctgaggataccaaaacccgaggatgctcaagtcctaaagctggcccccctggaacacaaggatatgaaaagccagccttttctatcagtgggttccacgtcctgcaaatacagtattgtactttccacgtgcggttgtttcaatccatgaatgtggaatgtagggataagaaggggcacgtgcagtgcatcctactctgatataatctattgatttagctgatagaatgtggtatgaggacaaagagaaagctcgactcctgagttcatggttgtgggtggatggtggcatggtgaaccaagacaggccctagaggaggagcgcacttggacagggaagacgagggtaggaagcagaatgtgtttatttctacaacacagtgtgagaactgagcaccagatatgcaccaagttgccacaggaacttcctgaggagccctgaactcttcactcctggcctcacaagagtgaccctggaggagcaatgcatcattgcaacgtcatttccatgttcacctttttgaatattaatgaccctggctgccctttgttctgctggctgtacctgtccctagaggaggtggaggcacagcagttgaactcagggtttgggactgaaattccatcaggcctttggatcaatggaaatcttctatgctatgacagtgacacaggctcatgtcttctttcacttaattccagaagctgggtgacatgaagtcgtgttcatgagacagaattccatgtaagctctaaccccaaaccctgtggctgtggggccagaaagcacacgagcagaatcgggggtctgtgttgaatagaccactcaccgcaagtggctgtagctacaagtgccatgtcctgatcccaatggattcccaaccctgctgtctgggggaaaagctaattttaagatttatactaggaatgcacacaagaaaagaggatttgatcttttttggcatatctggtttgcagctgtgtgtctgcactggattgttaataatatcagaaacatatctgaaccacctagagatgtgcctctgttgtcaacactgtctggaaatagctgtcaggcccacactaaacaaggctctcaaagaagggagagaggagaggttaagtgtcctaatagaagttataaaaacctatcagttcaggaagaaagaccaagctgcaaagacagggttggaaaatgtgctgtcactgcttgagtagtggccaaaatacctggaaacctgagagaagcaggtcagggccagtgcacagtccaaagtagtcatggcaaatatgcatccaaccctgcagcatttgtttacccgtatcctgcctattgcctgactatcatctacagctgggagctctgtgtgattaaaggccacgtagtgcaatccccgtctgaggctaacacatacctacactcacacatcaactgcagtagacacaacaagtgcccatccatattcctttgaaccttctcttttcagtgcctctggccccagttccaaattccagcacctgcacctctgtcaaaaggctttctctggccaccagagcctgatcttctcatagatattgtgggttggaactgacaggaaattaatgcctccagggccaaaccttacccagtgactgatgggagttggtaggtaaatacaccctgaggtggaaaaaatctgacattcatgttcaacactgtttaccagagtcccctgagggagtgaggctctagcttcccacaaaaatacttgctgagcttgaatccttgtctcaaaatctgtttctggggaaacctaaacttcgatacctggatgtatattacacacacataaacacacacagtactctactattcatagaaagttttaaattgtacaacaccctttacttataccatcttattttatatttacgtcaactttgttattgtttctatcattccattttttaaaatgaggaaaccatctcacagaggtgaatatagatcaccaaaagtcatatagaaggctcaaagccactacctgctgctatcaatgcttttggcttttctactgcatctatgctaccccagtggaggataaatcaacaaaaggccacactttcaaagagctcacttatagtcagagtgtctcttggtaaaagctaaaagtgctggaatggcagagccatgtaacccttggagttactactcatctcccacaaagtctcccttattatctcctggcacatgctacaaacaatagtaggtggtgttcaatagctacatgatagatagaaagatgaatggatggattgatgatgaatgggtggttggatggacagatggatggatgaacagatggatggatacatggatgaatggatgatgaatgagtgaatagatggatagggatggatggatggatgaatgaatggatggattaatggatggggataaatgaatgtatgaatgataaatgggtggatggatgaaataataagtggatagatggatggatgagttaatggatggggatagacgaatggatgtatgataaatgggtggatggatgaatgaatggatgcaaggaggaatggatggatggatggatggatggatggatggatggatggatggatgatgaatggatggatgaccatatcagtccacaatgaatgtctgagcctactgtagccttagccttagcaagaacaaggctgaagttacaacttaaatgtgatttgcatgtaacttttgcttattttattgtctatttaccagcaccaaacacatctgagatgatgtgtatgaaaatgacatctactaatgatgtcagaacagaaagagtttgagaaaaacaagtgtcaattactcaccagaggcggggtttattcttatgctttaggaagaataaaaaccacctgggaagtttataagcttgttaaaaatactaatttccctaccattaatagaagagtctaattcaatggaactcccaggaatcatgtaatatccttgggtaattcacagggattgtgatattctaagctgagatgaaggcatccccttcaaataggcattttcttccctcctctagattattgtcaggattcatcttattgcatcagcatcacaagtacacaagttgcttgaagagggagtcagaagcgggatgtaaaaggcattaaccccaccctggatatgcactgaaagcgttatgggcaaaataaaataaacatcctagactgggaggagaagttaggggcctaaaaattgaactccacacccagcatatacatcttttctaatgcaggcaacagaaggctgttctcatctttgcttgaacacattctgttatgggaagttctttacctcctgtaactgttcattcatttttgaatagtttggttacaaagttcttagtggttccatttctgttcaatgatgctgtaagaattaggtaaaatcctcatgtaccatgatacccagtggaatatatagggataactggcatgtcagttctaagatgagcacccttatttcttcaagtgtccatgtatagggtttgatgaactcttaagcatctgggttgacatcctctcgacctatcattgtttatcagtgtttctctgagaatgcggtactaaatttatccttccagctgtgctctgataaaagtagagagggcccatcacaccctttattatggacaatctacctccatcattgccttctagaatcacattagctgatctggtagccacatcctattaagccaaaactcaattaaaacctctggagtcttttgtcactggaaacctctctgtgtgtggccattgatccagttatcagcactctgaataaagccactcaaccatgttgtgaattatctgactattcagcctgcattttggcatctctccatgtactccacgtagaaagaaatgcattgcgtcttcagccttcctctgttcactagacctgggtagagctatcaaaatcaattgtctgacccctattgctggaggcataccatcatattagagaagagacactggtatgggatgtgataataccctcgtaaagacacaccaggtaacactttctttccagagagtagatgtataaataattgttctcatcattacaaaaatgaccacttcctatgctggttcaggataatgaagaaacacagggctctctcagcatactcaagaaacaaaactttagtctgaaagtctgctgttttttaaaaaagtactttactccatttacatttattctgattactgatcatttatttagatatatttttgctataattttcctttcttttctgttttattctttctttttcctttcctgccttctgctctattttgggatatatttttgctacaattttcctttcttttctgtttttttctttctttttccttacctgccttctgctctctttttttttttaattccttttttcttactcttcttttggaattatttatccatacttctatactttcatgaatatatattaagcataatttactattattttttatattctgaagctaatcaatatctctactatctttacaaggtaaagatcttagccctctttaacttgcccccaaattctgctttcctatcatctttgatattattgttcagtatcatattcattttcatttttaaaaactcttaaaatattattgatattagtattattcttatagtagatttgcgaaatgttttccccagtttcttaactgcctttgctccttgctgtccactggctcccttccagcttccacctcctccttttaacattgcattattgcatttgacctttcaggtagtgagtctcttagtctttgtatgtctaaaagtatctttattttaccttcattcattatagagcaaggagcgaaaccgttttattgagaggtttctgaggggactgaaaagaggggaaatgatgaggttctttgccagaatctcttcaggcagctcaggctcctatccgctggggaaagccctactccctcttgagtgatcatttaactgaatagagacgtgaaattgatagtttttttcccttaccatttagaaaataatattcacttaccatctaacatttgtcattgccaatgagaagtgtgctgtcggtctgaatgctgctccttttttaggtacgctttttaaagacttttatatcatcttgcatattctgcagtttcactacaatgtgttaggtgtggattaataatatgtatccttctcaaggttcagggtgctactgcaaactggtctaattatttttaactatggaaattctccactaatttttaaaaatattgtccccagcactttgggaggccaaggcgggtggatcacgaggtcaagagatcaagaccattttggccaacatggtgaaacccagtcaatactgaaaatacaaaaattagctgggtgtggtggcaggcgcctgtagtaccagctgctcaggaggctgaggcaggagaatccctcgaaccccagaggcagaggttgcagtgagccgagattgcgccattgcactccagcctggtgacagagcaagacaccatctaaatatatatatacagtatttatatagtatctcccactcattccataaattcctcctggaaatcctgttagccgtattttggagcttcttgttttacttttaccagctcaatttataatttgtatttgtatctttttaccttttggagctgtattctaagtggatttgtcagctctatcttcagaaatgtttctccaattgcatcagcaatcttctgtatcttttgcaaatccacctgttttctttcgtcttacgttatgaaatctattcctcacatggtcactttggacatctaaatcacgcttattttcagctccgtggactttactctcatctgcagttctttctgaacactctcatttgttgtatctgtaggctgtctctctcagtggtaaatgccttcgtgtgtttgtaatgctgatggttacttgagggaaataagaatgtaccacttggctcagtgtgcatgatgtaagcttgtctttgttgtatgttggctcctgaagaaattccacccatgtaccctgggttatgagggtgatcccatggggtagtttaactttggcttctgcagaccccctggggtccaccagctccacgtttttttttctttacatcatctctgcgctaagctggtttttgttttgttttgatttttttgagacagattcttgctctgccacctaggttggagtgtagtggtgcaatctcggctcactgcagccaccacctcccaggttcaagcaattctcctgcctcagtctcccgagtagcttacaggtgcacaccaccatgcccagctgatttttgtatttatagtagagatggggtttcaacgtgttggccaggctggtctcaaactcctgacctcaggtaatctgcctgcctcggcctcccaaagtgctggaattacaggcgtgagccaccgcgcctggcctaaattggtttttaatgagatttcatggcttgagtctggctgtgtgcatttactctcatgctcacacattgtggaagcttgtgcattctgacttccctcaagtaactctttttctacccaagatgtcgaatataaagcccacatctggcgctggtgggtagaacttttaattcccatctcaataacaggacaatctttattgctggaagttcagtcccatcttctaccacccaagaatcttgcagcttagactccctcccggtgcagtttatagcccagattcatggtagacgccttaacccaaattccccaggccttctgctctaactctggcttcttgtttcagcacctagagatcttccttttccaaccctccagctcatctgtggactttcctgtttttgttatttttgtagtagaaggggactttcccaattatctcagttggccatctttaccagaagtctaaaggaactttggaactttagaggaaataattcacaggcaatgctttcccctcagcctttaattggatgtttttccagccatacatctctgcatccaagtcccacaagagcaagcaagtgccttcataacaagacaaaaaaaaaagacaaaatattcactaaagcaaaagccaaaccttacagaaactactctaaaagagaaagcaccatgtgaataagcaagtttcaatgttctcagtgaacactagtcttggtatcttctacatgctcatcaaaggtaagatgctggttaagcaaaaggaaagtttctgcctttgtgtccttggcccaaaagcgaaagaactcataatataggaagcaccatttttcttgtaaatataatttggagaagagcactctttctttgcaattcctccccttcaccccaactctggtcagaaactctgagcagttgtgtgtgtttgcaaagctgaatgagcctgaagttgagctgttcaataatgtacaatagaaatgttaactgccgtattgattttttattatgtttgtattgcctgtttaattttattttccttgcaggaaattttttaatcaaaaatccagttattgaagagccccataagccaaccgatgctggtgagactggaggaagcataggcattaagtctctcctggttattccctcttccaccttcacccactcccagtcagagttcaaaactgaaacctcctccaactgagagtaaatgcatgtgaccttcagttccacagaggttaacctactctgattaacttttccatgttattccattaaataaaaacagttttgacacccagagactaaagcatcctagagataatataataaccctatgcaatcatttcaaattggattgtaataattcatttaggtgaccatacatatttgttatatgtaatatgaaacatcgcaaaatgaaatcaatagaaatgtttcttgttaatgaagatatactgggctgttatgtgtgggttgtggactcaatacccacagaaatcttatttgtattataaatttcagggtatcctgagagttacaaatgaagatagcatttcttaaagaagcgatagctggtcatttagaaaattatatcataaattttatgtcatttcttggtctttcaaggtctttgcccagcaacatagtcttgtgatttaggtaaaaattctggctgagtgattacattcaactatttgcaaatggacttttgcccaaactttcatttttacattccagattttaaaataacttaactttagtaagtctgaagattttaccttatattttaatacagattgtagaatattttattcctcaacataaaaactgaagacacagaggcggcgacagataggtataggttatagatacaggtataggtataaatatataactatatacataggtacaagccaattaatgagactatgatagggtttcactggaatgctacctttaacttcacatatgaaatataatatagagtgtacatgtttatatataaataaaataagatttttaaattttgcattaagtaaactcatatagcgttttagaggcaaattttaataagttcttctgcattttgaatgatatcacagtgagatttcaccatggcaaatatctgcagcaggaacaaagaattaatgaattaatgaactatatgaatctatttatacttctgttgtcaaagctcgtattcttacttctagtgagacctcacttacaccttgaataagacccatcagatgaccctcacctctagtaagaatgcagaattataaaatgcaaatagagttatttgcaataaataagtggtcatgctagaaaatacaaatttaaaacaggttcataacaaataacagtaagcatttttcttcatctattacctgttttcttggtgctactctcttttctgccatacctctggaatcctcaattttaaataactgcaaatttgcttttagataaaaccaattcttaacctgccttaactgattcaataattttaatctgaaatctggttctacctgcctccctcatgagcctgttggatttgggtggtgcccattccacatcactaaagggttgtccacatggagaagggctgcgcttgcctttgtctttacctcctgatttctcagtctcttaaatattttgagactcaggccttcaggctctgttgccctctaactttcctctgcagtgttttctaccctcctctccttaactgacccacattcacttcagactttggttttggtgtttggatccttaagcatccacatgtacaagtcactgttccttgaggttcttcacactctttctacaaaccacacctgacactttcaccaacaggagctgctctgcctctgaaactggaaaccctgagattctctttgttttcatcctctacttcactggctctcacttgtgcttccaatctgttatgggggatcttcaaaaagttcatagaaaatgcatactatgaggaaactatgcgtagatttcaaaccatattttgcactgaaataaatgagtactaacttattacggcatgtctgaacagaatcaagtttgagacactaagaacaagacatcattttgaaaaaagcccctttcagaacaatgtgaattctgctaaaatggacccaagaacaaacattaaatttatagtgaacctttgtggaagaatggtgaaatcattgatgctttacaaaatggagacgatgccaccaaagaaatcagcagtttacatatggataacttgttttttaagaagggatgagaccgcattgaagatgaaacccatagcagcaaatcattcacatcaaattgcaaaaaaaattaaattaaattaatcttattcaggacctaattgcaaagaagtgatcattaacagcagaaacaatagctaacactatagacaaatcaactggttccattttgaacaaaaataaataaattttgttcaaaattttgaacaaaaagttaaatataagcaagctttccagtccagtcaatgagtgccaaaactatcgtgctcagctcagctgcagaccagcgcagagctttcaatggaaattttaaacaagtgcgatcaagatcttgaaacatttcttcaaagaactgtaacagaagatgaaacatggcttatcagtacaatcctgaatgcagagcacaatcaacaagtggacattgtccagttaaagcaagagtggaccagtcaagaacaaaggtcatggcaacagttttctgggatgctcaaggcattctgcttgttgactttctggaggatcaaaacaataacatctgcttattatgagagtgttttgagaaagttagccaaagctttagcaaaaaataaaactagaaatcagagaaagcatcaccagacagtccttctccaccaccacaatgctcctgctcatcaaacacaggaaatctggggagagtttcaatgggaaatcattagacatcaccttacaatcctgatttggctccttctggcttctttttgttttctaatcttgaacatatctgtaaaaggcacccatttatcttcagttaataatgtaaaatatggtgcataaacatggataaattcccaggacccacagttctttagagatggactgaatggctggtatcatcacttacaaaagtgtcttgaacctgatggagcttatgttgagaaataaaaattttagttttatttttatcttttaattccatttttcacgacctttttgaagttcccttatatttccacctcttcaagggctagtttgcatcatcacagattccagaatctcacccttcatcctggctctgccctcatcctgataacatgtccaagctctacctacctttaaaaaacaaaggcagttccctgggctcccgtttcctctctagtgcttatctctctcctgcccttctcagggaaatttcttgaagggatagcttacacttctttctgcttctgcccttccctctcactgctcaattttaccaccacataaaactgctctggccaaagtccccagtgccccattaatttctaaatcccgttgaatatgtctgtctgtatttatctctatcccctgtggctatgaagtctcatttttgtaacattttcattccatgaactcccaactccatgaaaggtttctctttttgacatctgttcttttttaactttatttagattttaaatgaactatttcaaacattcacaaaagcacagagaacagtatgtctatctttctcttactttctcaccctcttttgtcttactgtcttaccctctataattgcctttggtgaccttgtccactgttttgtcccccttacccccaacagtgttcactgcaagaccatccccacatctcctgatctgtgagtctctctgtcctgctccttcttgccacccccactggatgtgccactggctgctcaacatagctgacctttttgccactcaccagcctgctctcctccttcattgtttctgctgaccaggtcagaaacatatgcacccttctggcaaaatcctgttattggatcttggaaatgtctttatactctgtccccttctcctatctgtccctccatatccccctgaacatggctttaattcaggttttatcctcctcattgtatttggtgtaaccgtctcctcattagcctgctttctgcagtcttaccccaccaccctccaatccattctctacccatctactacacacatcttttttctttttacaattaaaatcctatcatgtcacttatgtacttggaaggcattggggacccttcctaaactcaccataagatctagactgtaacatgggatactagctcctgctcaattcttggctcccactcacaaaccctctgctgttccaagctagaccacctgtccttcccagaatgccacgccctgggttcttccttggccacagggctaactctttcttccatcagggctgctctagtgtgcttcctcgtctgagtggctttgcctgcatctcaggtccgggatgataccgcccctcagcacacacctctgccattgctcttaccacgctgtggctactgttggcatatttgtctccctgacccatctgcgcaagcccagaaagcagggactgttctgaccaggatttactgcatttcctgcatctagtagctgctcaataagtaccaaacatatcctgactcacacactttttcatatgcatagagatggtatactgggacttaccagaaaatcaataacacagcgaaggattgtaaaaaccccagccagtaagggcacggtgttcatgataacttaaacaaacatttaaattgaagagccacactttcagttgctttaaagcaagtcaaatgaagttagcatcataaaatattcccatgtcctctaaagctattaattggtaacccataggcatataatcaaatgctcactcaaaaggctgaatccttgtctaagcacagaaaactggagcctgatttctgtgcatgaggtgatgcaccaatgacaaacctttataccagagcacgactctgaaattgttcacattgtgttgctgtgtgactatgggcagaaatgcagacctggctatttagaggagaaagaggaagaagggcaggatctacatctaagagcccgtgcccccaattggctaagaatcacagttaaaccaagtgccttatccctagagtctggggaggcaaaggcttgtcttcctctcatcaaataatatatatttacattcccctactaacttgccagttagagtaactggatcacactaagaaaacttatttccttttctttgattaataagctcaagattataatgtattgaaagtgaatatattattgtatattctccagagatagattcccatgcaacctggttattctttctttgttcccccaacaagtcaaattctctggtcttttcttccatgtttgatgtcccaggagtctagccctataaatgtcaccaatgggcctccttgctctgagtcttctgcttgggctcaaccaaagggaggcactgtcaggagattggggctggaggggagaaaggccaggacacttattcctccacatcctctgtgccaaccctcagtcttgcccctagctgcgctcctctgcctgtagccccaagccccatcaggagaggcctttcccatacatctcatctactcgccctgtcccttcaggccccagggcactaacagatttcactgatgctccccactgggtacaccactgccttgattcctttaccccttgacctctgaaatagcttcttcaatgaactcctggaatgggtcatctctttcctgccaggaatctgctggggaaaccctcctatgtgacttcccattccatgagcctcactgcagaagccacgcacatatgtggcgagacagtagctctttgtgctatggtccatggacaagcagatctttaccatggtcagtattaacccccaaatcccttcccagagttcccccagagaaagaaaaactaacagcatagtttaagaaattggcttacgcaattgtgggggctggcaaatctaaaatctataaggcaagccaacaggctgaggtaagagtcgattttgcagtcttgagttcaaatgctagaaactcaggcagaatttcaacgttgcagtcgaagaagaaattctgtctccattcagggaatcttggtctttgttcttatgaacaaagacatgttatagaaggaaatgtgctttacctaaagtcaattgatgtaaatgttaattatatctaaaatataccttcacagcaacatctggagtagtgtttgaccaaacaactgtcctctagccagctgacgcataaaattaacgatcacatccatccaccacatggattcagtttcctttggggcaaggaggtttctctttacttcaaaagctataagggctcagaactcacttatgtcctctgatacagtttgtattcacttgtgttctctgatacaggagtaaggaaaagaaatgcctaattaaacaacaaaaataaccaccttcctaccaccaaaggaaaccatccaaaaagccatcagagcctgcacagagtatgaccctgtctttttccttttttttttttttttttattgacactgattggcttgtgcttgaaactgcccaagaaatttagaaatataggcaatagaattagaaggagtttgaactgtgaccccagagatcaaaccctgacaactcggtatgttaaactgtattaaaatgtatggctttgaaggaagggatcaatatgtttttctctgtttgtgaagggcctgcactaaatgatagtgagaaacaagcagccccagaacacagatgcagccgaaggatttccatggcttgtgctaactcaacttggctatcttgatgcaaagggaaaatgtgaagggcttccagaaagaacagctgagatatttgctcactggtttatttgcaaaccaagaaagcagtttttagttgcgtatgactttaacaaccacatcactgcctctttgggcctgacccaagacactattttaacttacagtgaaatatgactgaaacccagcttctcagcctgtgttctatgggagatccagtaggaggctgaagggttttgcaatgactgttgtcctctgcttgctgccacaacccccatcaagactcctctccccaaggtacacccttcctcccccaccccttcagaactaagggaggcaacaacttcccaaaagttcatggctgcatttccatcccttcgtatgaaacctaatcaacagttctatagataatttttgggataaacacagaaattgatcgttctggtcttaaagctggaaacttacatttgttttatctgagttccttcttcagaaaatgaccttcaggcctctcaaagaagtatcaaagggccaggcacggtggctcatgcctgtaacctcagcactttcagaggccaaagcagatggatcacttgaggccaggagttcaagaccagcctggccaacatggcgaaaccctgtctctactgaaaatataaaaattagccaggcgtggtggcgcatgcctgtaatcccaactactctggaggctgaggcatgagaatgccttgagcctgggaggcagaggttgctgtgagctgagatcgcaacattgtatttgtctgggtaacaaagcgagactctgcctccaaaaaaaaaaaaaaaaaaagtatcaaagaactgaaactcagcagatcaccacatccagacaatgagatgtgggggccctcattcatcatgattgcttccttgcccctccctagtttctattttcttacacattgtttggtttctttcatttcttctatgctacataaatccctagctttagtccctcagggagatgaatttgagactgagctcccatctcctcagctgcagcacctgattaaagctttctttcttggcaatacttgtcatctctgtgattggctttctgtgcagtgagcagcaggacctagaccaaaccccttgtatttcagtaacatttacaaccaacagatgaggaaccacatgccaaaaatgtaaaaccattgaagtcctgggggaaaaaatcagtgccactaatcccagaaatctttgtaccatctcccaacaagaattattctttaaaacgagttcacagaggagttatggggtggctttttcacaatgtcctctgcaaatcacgatgtcatttccttttcacttgctcttgttcctgcctgcattattttctttctttctttctttctttcgttttttaagactgctttctgcctctgtggtcatcttccttttttttttttaccattcttttatcagttttcattcattatgatcttaagaagcctcagtgtgggctgtagtctctctctctctctctctctctctccagaaaagcatgctttcttaatggaaaagtctattcaaatgcagaggacctctttaccacgtgcatctgttgcaaaatcaccaactggagtatccaattatattaaaaggaattccacggaactattatcctaatagatggaacactcctccaataatcatccacacgagccgaagacccagattctctcatccatgcaccaaaacaaaggacttttttaataagaagcaaacataagggagctgcgagacatattaaatgcaagtggtttgcttttgtgctgtaattccttagataaatagagctcaaaacttacttccggaactccagagctttccttcctctgtgtaagtttttcttttgttattaagatggctttgcatggtttcagcttgcacagtcattttcatggtttcacaccaccaggcaaagtgaggacagcccatacctacagtgttggagctaccatgagaacaagatggacttttctttcttccctttgtgaaatctctgcaactacttgctagaaaggagccaacaggaaagagatgttggaaatacagggagaaatgctgaagagcactttggaacaggtactttcccttctcttcatgcagagaagccatccactggacatggccggatgatagctcttatggaaatccccatcactggcaagggcgtggctactgggtccaggtgccttagatgcagccagcaggatgcacagattaatatttttctttcccaaagagaggactggggctttgataagggatttctccagcgatacacagctggtaaggacagtcagtagctggcacacctctctcaagacctgacagtagtgtgagttagggacccccctctgccccggatgtcagtcatttttgggttgcagcttacccactccacactgacatgcttggtttattctctgcctgcccatccaggctgtgagccaccaaagtgggagcaggtatcgttccctcctgaggacccttgggcctactgcagggcctggctcagcaaaggcaaaagtgagtagtccaggagtgggtccctgccctggctgagtctgggcatctgtctgaccctgtacccatgacctctgtaagccaaaggtgtctatagatccctctgtcccctgtcccctccaaatctggccacttaaggactgtctttcttgctaaacccctacagtgtgctctggctggatcattgctcgtggggcatcccttcctttctcagcagccagcgtgccttcctcgtgctcattccacacctgcctccaccccacagaggagaggctcggccacagccatggctgaagtgaggaagtttcaagtccatcagggcatgctcctcacactcacacatcacagacggatgccttctttgggtaccctgtgctaccagcctcatactcactctgtcccgtgcccttgctcttttagcatttgggacatacagtagctttggagctgctttgcctcctcctttcccttctaccctggttcagatctataaccatcttctcatgtatttcccacaaatgccagtcaagggcgccttgggcacagggcagactccatcccagagtcccccaaggttctgcttcctgattcattttttttttctaatcacttagttctacctggagcatttaataacattctgtacagagcatttacttttccagtgttactgcttctctcagcacctgtcaagggaagctcttctccactggcccacagctgagcaaatccctgagcaaagactttatctgacttgccaagaaccaccgagccattcagtgacactcaagcatagagatgttatgctaaaatctcctgtctctcaactatgggcaccttctctggtctcatggaaacaaggacagccttggtagaaagaacaacattacatagcaagggcacattgtgtggcatatatgtatagtttgatgcttaaaagtactgtcactagagtgagactgacctcgtttcaatccagttcacctgtgtcttagctgcatcacttcgtgcaggttagttaacctctcggggtcctagtttccttatctgttgcatgggaatatcaccttgcaacactgagaagataaataacaaaaagcttaatgcaaggtccagcataaatgaagtggcaattatcatgattaatttaaagaaaataaccatatgactgaattgacctaattaaaacagaaacaggaattggaagacaggtagagcaaaagctacctcttccctgtcatccctccgggagccccacgtctttttcctctgctcttccccttggcgcagctcctctaagactccctcccacctgcagcctctacaacttctcccatatttactttcttgaggagctcaagtgcttcaaggtttcaactcttgttgttgtcattgctgattaaattgcacatatatgatctcctttctcttcccagtttctaggttcttcctgtctatgtcaatgtttcccaaaattgtctggtcataaaactcatgggggtagggagaggacttgttttaaaatctctgaagcccaggtttgctatgagtgcaggaatgtgcaagtttaacaggtctcctagagcgagcccaccaccaggcaaggctgagattaaccaacttgttgacccgagcaatcatggtctccaaaccccaaaccaagttgcatgactgacaaaggaatttgcactgttttcttttgtaacagcaaaagcagaggggaagaaaatgtgaagcccaaaacaccagaatgtcatatttctatagcttatgaagacagcagggcactttagatctttagaaatacgggatctttagaaatatgtgatgttcgtatggccaccatatatgcaggacacctctactgagaatcacaagatttaacactaaatgtgcttattattagttagaacacctttggctatgaccggtatgctataacaatatagacactgccactcatttagcaagatgtctaaaagtaggtggtcccaggagagtgcggggcagctcagcagtgccatcgatggaggacctagcatcttgtgatctttctgccctgtgcttctcagcacactggcttttcaactcaaggctgcaacacagatgggagctgcggttccagcatcatcccatcatttcacaaacattttcaattcaggaagaagtgccaagccaacttgccgtattctcttttgtaaaaacttgacaggcagggaggggggcagattctccctaaaagcacttgcccttgtgccttagtgggtagaactgagtcacaggcccaccactgcaacactcactagcaaaagagaatgggattatttagtttgctttaacctaatcatggttcatccccaaagctcatctccactgagcttatttctagaataaacatagaaaggaggaaaaaatgactctgaaacaggaaaccagtggatttaggaaaatgcacaatatcacagagccagaactcaaacttttgtaaatctgtttccagaacctttatgccaactgattccagctacatacaacttcacttccaaacaaacccctgtatgcttgctggccttccatcaaagcaaagttattcttactttgtactagattgctatgttacatccagactcttaataaaaacaaactaaacccaaacacctactattgccacacagagcacccagtggcctcagggttcggcagggtggcagtgaggagttctagcaaagcttctcccacccaagtgtggaccctcagctgaggaggctggtcttggctgtgctgttccatttgcacgaagatcctgatagactcctccatctttagattgcagcagctgggggttatcatagattttctcttccaaaaattaaaaaaaaattatcttaaaagaagcattgaatagttatgagatacatcataaaaatactctctatatgttaattattgaataaatgtttatattattaacttatctcctatccccttccacaagtgatttggagaagcttttaaaaatatagtcaatctgagtaagattagtggagtgtatcaatgtcagtttcctggttgtgatattgtatcatacttatgcaagatgatatcattgggggaccctgggtaaaagagacagtggatctctctgtattatttcttaccacctaatgtgaatctacaactgtcttaaaataagcaagctaaaccttaaaaaataaattcctcatcaaaagagtaaaatatattcctcatctcaaacatacatcatttctttgtgttgggaacactcaatatcttaattctagctattagagactatataatgtattactgttaactgtagttggaatcctacaatgggatagaacactaaaacttaccccttctatctaaatggaaatgccaattaccctgatccgatctctataacattacatatattgaaacatcactatgtaccccataggtacaattattatatgtcaatttaaagctaatttgaaaaatgttgtaattaaaaaaattaaatactaaactataaataactaagcatatcacagcaaaagggaaagtgggtagcaaaatggtaaatctgggagttagagaaaagcagaaatgcaagcccacagctctctgcagttgctagcagtgatctgaaagtttgatctaagctttctatcctggtggccaaagacggaatcagttacaaggatctcagtgttcataagatattattctaagccagggtcgctgcaggtggctgcaattctgatactggaggaatttgttccttagatccctttgcagttctgttgtataacttatgcagcaacactcctacaagagataacaaagaaaaattcacacaactattttttaagtgttcttgaatatatatagatagtggaactccttggcataaacttcagtggggaaaaaaggcagttttctaaagggccagttaatttcatcggtgggtaatgaaagaaagtgttgtggtgtaatttggtcacccttctgctatcgttacctggtgatcactgacgaacatgttcatcctgacactgcaatacatgtccttcaggaccagtgtgcaaaggcatctcttcaatacattttctggtgtcttccttttaagcaaaaatcaactacttgcaggcaacccccaacccctccccttcctctccctcaatgccatgcccaacgccactccctggctgcatgaccccaaatgcaacttacatgagggaccagacacaacactgggggaacctctacaagtgcctgacccaaggaaccactccagagagcacgcaccgagcagctgaggccacagtggttctgggctcactgccaagctctctctcacttgtcagcaaaagcaaaattgggatttttttttttttaaacagcccctggccaagtgtttctgtgctgggtgttactttgcttcagataggcacaaatccaacctctcctctggagcacaagctagagaaatcaaaagtttaagaaataccttaaatggctccatacactcaaaccatgctggttggtgcagctcaaaaggcaaagaattcaaacatgtggttcctaacctcacagagctgattatctgtccaaggccaggggtagataaagttcttggagaagcagcagagaactgaatcaaatgaaaagcaaaatactataaactcaaggtttaagtgctgggtttgagggaacaatctgggaaatatacccaggaagtgggctttaaattggtcttagaaagaggacttctacagattgtcagagaagagagagtgttcctcgcgtgaaccacagctgggaaaaaaaaacatgatggtggaaatttaaattcatccttgggggacagggcactgattgacatggttggcacagcaaggccacggggggaataaatgggagagaaagtcagagagggaggaccagctaataaaagtctttgaatactacactgtggcatttagaggattcacaaagaatgacttcagcaggtacatgccagccagcctaactgaaagcaaagacaacagaatgtctcatgcataaaaggttctctgcctaaattatttttgatctattggcacatcttttatgatctactaaaaaattaaatttttcattcatctattgtattcaacaagcaaaagctgcaagcccagattattaatgatgtcagatcttgtattcctaaaacaaatgcacaacagttccatttctgatgacaaaaagagagtcatttgtttcaatcatggaggacaatcttattaaacatcgccaacctactgccaagctggctgctcaccagtgcacagctacagaacaaatggaatccggaggactgtcaatcttcagatagtgtcactgcccccaaaataataaacttagggggagataaatctgttatgacttgaacacttttgcttcttaactctggagtcttcaagttcagcaatttcataattctttcatgtggcaataaggctgtttggcaaatgctagtgagaattgctaaactgagcttacctgcatataaaccttatacacactcatatcaactgacttaccctttcaggaaagtaacttagtaagggaaataataaaccttaataatatgcatgccttttgatccaataagtctgtttctcagtctaaggaaataatacagaatacagaaaagacgttgcacttaagaatgtccatacattgttgtttctaatggccaaaaaataaaaataaacattgagccaacccattttccaatagaaggggcatgatttaataatgctccaggcctagaaagaaatgtttatggtgtaatgttacatatatactatgccctatatagtatgatatcaagtatatgaataagattcccagaatgaagaataatcaagaaaagcaccaaaattttgacaatcgttttgagtgttgagattttatgtacctgtttatgttcttctttattctttgctatattttcaaaactttctcagtgatcatgtatcacttttaaaagcaagtagaacacaagaacagaaaaaccaaacactgcacgttctcacacataagtaggagttgaacaatgaaaacacatggacacagaaaggggaacatcacacaccggggcctgtcagggtggtggggaactagtggagggatagcattaggagaaatacctaatgtagatgacagattgatgggtgcagcaaaccaccatggcacgtgtatacctatgtaacaaacctgcacttttcgaacatatatcccagaacttaaagtataattttaaaaaaaaaagaactatcaaaacatttctcaacaagttcctcttagaaggcctatgagctgggaggcaccagaaggaatgaagggcaaaggtaaggagggaaaacaagaagtgagggaagttcctgttgccccagaaggagaagcatgttccaggattaccaaaaagagggattttcaagggaatgaggccagggttagcgtgtttccagggtcccagaataggcccagctcccacccagatgcccatgaggtaggagacattaaattaaacacacacacacacacacacacacacacacacacacaccccactgggtgtagaaggacccaaaaagaagaaaggtttatgttccaattcttacttagaattgtgggagaccacttgggggtggtgcccaaaggtaacatgaggtgatcccagtaaagtagaaatgttagagtaggatctggaggccctgaaacagccaccaccccagatgtccacagcctgagaagcaaggcacagaaagatccagaagttgccatgagcctcagtggtgaacaggtcaatggactgaagaagcatagagtgcagacaaggagggaccaagtgatgacactaatgaccaagtagcctacaggaacgtcagacaaggccagcagatgctgcaacacacccaaaaccataaggggtctactatgttttgttcagtttacccccagagcctcaagcacgcagagttaagtaaactatactcctagctaacagctaatgacataccatcagttaatggtgcaatctcctcattagtttctgattgattaattgccttttattcccgttcccataaccatctctctctcttgccatgggcatgcactccattgtgttttactaatttggatgtattcttgagatttacgtagttttcatttgaataaatggtaatatgctaagcaatgatggtctgtttttttgtttttttgtttttttgtttttgtaagatggagtctcgctctgtcgcccaggctagagtgcagtggcatgatctctgctcactgcaagctccacctcccaggttcacgccattctcctgcctcagcctcccgagtagctgggactacaggcgcccgccaccacgcccggctaattttttgaatttttagtagagacggagtttcaccgtgttagccaggatggtctccatctcctgacctggtgatccgcccgactcggcctcccaaagtcctgggattacaggcatgagccaccgcacctggcccctgatgttcttttcttcctttcttcactcagcactctgtgtttaaggtctagtcattctgatgtgtgcacgcctactttggtttctgcatattttttcttgatttatgaaactttccccacagcaacaaacacctcagattcagtcaactccagcacaggcacttctgcaatagatattcttttgcatgttgtgttatggacccctatgagaatctctctgatatttatcacctggactggaacttaagagacatacctgctcaacctaaggcttgtttcttgcctttaaacatggttcataagtcttcacttctatccacaatgcttgaaagttgcagttttcccaaatccacacccatgcacacacacatatataaacagccccgtgagagacacagagtgcattgcccgggtgccacttcaaggaaggacttgctgcccagctgcagggagtgtggtcaacaggcggcctccagctgttagcaactgaagggtctgccttgactgcacaacacgtagtctttaacctcctggagttgattatctgaccaatgccaaatacagattggcccgaggtttcacccctcccagggcagcttgctgctgggggtataatggccagctatttcagccaggtgcccgcaaccctgaagagcaacctccactccaactccttttgggttgagtgagactttgtcctgctacatcacatctctacttctcctgccagtcttgcatcctccccactctcttctcagctcattccaaataaacaccttaagccaaaccttgattcagtgtcggctcagtttgtgctctgggagagcccaggctacaatagcactgctcaacttcttaattttgccaatccactgtgcagaaaatggcatctcattgtattaattttcatttcactgcttcctaataatttggaacacttattaatataaatgttggttgttcagtgatcccttcctctgaatttatttgttatagccattttcttagattttgtggcattttcttaatatgccttgattccttgatcatcctatataagtttttttgttttgttttgttttgttttgagatggagtctcgctctgtcgcccaggctgaagagcagtggcgcaatctcggctcaccgcaagctctgcctgccgggttcacgtcattctcctgcctcagcctctcgagtagctgggactacaggtgcccaccaccatgcccggctttttttttttttttttttttttttgtatttttagtagagacggggtttcaccgtgttagacaggatggtctcagtctcctgaactcgtaatccacctgcctcggcctcctaaagtgctgcgattacaggcgtgagccaccgcgcccagcctctataggtatcttttatacacatatactgagtgacgtgattacaacagtcaagcaaattaacactatataagacttcctggtttaagaagttgcaaatatcttctcccaacatacaggctattaactttgtctatgtgaggtctaacaatgaatcaaaattcttagctttgatgtgataaaatctaccaggcttttatttttttttgtaatattgaagtctttttctcttttttgagatggagttttgctctgtcacccaggctggaacggagtggcaagatctcagatcactacaacctccacctcctgagttcaagcgattctcctgccccagcctcttcagtagctgggactacaggcgcatgctgccatgcccggctaatttttgtatttttagtagagacggggtttcactatgttggccaggtttgtctcgaactcctgacctcatgatctgcccgcctcggccacccaaagtgccgggattacaggggcctaatattgaagttttctataattattctcttacccctaactcgcgaagatattctacattttttctattacctttatagtactatattttatatttaggtttttaatttatctggagctcagccttgtatatggtagtgaacacaactgggatgcagttttatttacattcatatggagaggaagttttcttagtagaaataaaggaaaaaatagtgataccaccaaatggggaggggagaggtaggcaaggggaataacaactaccggcagaggcatattatttaaagatagggagttaaccaccagaagtaactaataacagcaaaaacagaagcggttaaaggcaaaggcctccagggatggaggaaggtcggaagttagggaaaggggaaggcagaggctggaacatccttgtttctcttgtattacctcagtaattttttattattcttacttaagttaaacttttaaaaaatcacacttgttatgaatccttcccaagagatctctgatttcctgagtcagagaatcatccaagtcccacttattccccacccatccattacatgcactccttttcgaatgactccccaaatacatacaacagcatagacacactttatgacacctcagggatgggaatcagcccaactgagatagagagtgagcggagggtccccagcgggtgatgaagccacaaggccagtggagatagggtttgcaaagagtctgtgggtccctttcattttcccacagcagatgtgttcttgctgaaaagggaagggcatagccctgagttattctgcagtaaggtatctgtctgtgagtatacaccactctcatcttccccctaaagatagtttaaaatagccctgtctactgtccagcaagttcaaattacccagagccaccgtatacaattgtataggttctagatgtgaaggctctaaaaatgccctaaagctgtgtttctggatgaggcatcattgtgctttgcaaacagcactggactgggaatcagggagatgcattttgtccactagctttgaccatgaaccagtcctccacctctacgagcttcaatttcctctaagaaaatgggttaccagatagtagtttctaataccccatcccattttaaccacctatgattcaaactatgattatattcctggagaatctcatggtaccaaaatatttcagaaacatgttttgaatccaacaagtatattccactgaaattgatgacaaggcaaaaatctttatttgcgcattcaattgtccttttaaaatatgtcctttaaatgcattaattggttagtaaataactgaaataatttcacagtctaataagtgcacattagaatccaacacagcttctgagtgttctacttaagaaaagatgaaaccttaacatttttatgattcttagacatttataatattgccagttcattagatgaatatattgccatacttcatgactgttcaaagttttgttatcagcccaaatatttgacattctggaaagtgagagacatctctgtgggctaaccttccttcttgtgttcacacagcatttcatcagacctatataaaaaaatcagcacggcattgtggtttatgcctataaccccagcaatttgggaggccgagatgagagcatcgtttgaggccaggagtttgagaccagcctggacaacgtaacaagaccctgtctctacaaaaaaaaaaaatttaaaattcagcctggcatggtggcatacacctttagtcctagctacttgtgaggctgaggtgggagatcacttgagcccacaagtctgagactgcaatgagctatgattgtgcactccaacctgtgcaacacagagagaacctataagaaaaaaagaaaaaaggaagaaataggacatgaaggaatgaaggaaggaaggaagagagagagagagagagagagaaagaaagaaagaaagaaagaaagaaagaaaggagggagggagggaaggaaaagaaagaaaggaaggaaagaagggagggagggagagaaagaagaaagaaaaagaaaggaatgaaagaaagagaaagggaacgaaagaaaggaaaaagagatagaaaagagagacagagacagagaggaaggaaagaaagaaggaagaaagggagggaaaagaaaagcaaagaaggagaaaagagaaggaaggaagaaaggaaggaaggaaggaagaaagggaaaagggaaaggatggagggaaggaagggagggagggaaagaaagagaaaagagaaggaaagagagagagacagacagaaaagaaaagaaaaaagaaagaaagagaaagaaagaaaggaagaaaggaaggaaggaagggggagggagggagggaagaaggaaggaaagaaggaaggaaaagaaagagaaaggaaagaaggagggaaggaaggaagggagggagggaaagaaagagaaagaagaaagagacagaaagagacagagacagagagaggaaggaagaaggaaggcaggaaggaaggatggagaaagaaggaaggaaggaaggaaagaaggaagggggagggaagaaggagaaaaggaaggaagaaaggggaagaaaggaaggaaggaaaggagggagggtgggaaaagaaaagaaaaaagaaaaggaaggaaggaagaagagaaagaaagaaataaaagaaatcttccatatttcctatagtgtaagccaggtaacagcttccctaagcccttctaatcatttgtcaaatgcacctggaaaaatcccacaccttgatgactgaattttccattcctggctaaagaaagtcaggagagccaatgtttgttttttctactgtttgtagaaaaaaaaagtgtatggttttttctaccccgcaatgctccctgttatgggatgtggttggtgtcccagtgtacatttgaacaaatgattggttattttatatgtatcagtatattatactttttctaaaaaaaaggagaacactacaatatgaattactgaacatatctaattaagcaatctaccagctgttggacatttaggtcattccagcttttcctttctgaacaacctaacgatgagagaaccaaaagcttaattcaaatacagtcagaaggaaaattctttcagttgaaggaatgaacattttaccccaccataatatgtaacaaattttagttccatagcaaaaatagaaaattggagttctttgctgatgatgggaaagaacaaaaagacaacatccccttgtggttcagagtgagactgaaacctgcaaagggaaggagaatcccctaaaaatgggtgcaggaatccctaccctctctttctctcctcttgttcattccccttcttggcctcctctgcctaagccagagtcagggacttgtgtgttccccacagagacttgcaccaggctaccatctggccctggccctggcccagtgggcactaattatcctcagtcagcagatctggcatctccatcttgacatgtgtcccctcagtccctgtgtggtaattaatgatgtggaccacacttttcttctgaaattgcgccctcctcttctggcttctaggagaactctttctaagaccattctctgttcttcccatcaccaaatgctgctcttcaccacagtgctttccctgactttcttgacagcttttccaggcgaaattccatctttcatagggccaaaccttagccacgtgatgatgactccaactgaattctctatagagttccaggacaaaattttcagtttctaattgtatcttctccatcttgcattttaaaaatttaaagacattaatttccatcctgattccactaaaaagaaaaaaaattgatccctttgccaagttctttcaattaatgttaccatattatcccattcatttgggtttgaaatctcatagccatctttaactcttctttattcctgtatctaatcagccaccatctcctttcagttctatttccccaaaaggatcacattttgattacttgaggctgaattaaacatggttgaggctgagcagtgagttgggacccctttacctttccagctaagagcatttgttagccaactgtcaagtggagaagcaagaactccgcaagcagaagagctgcgtttgatgtaagcagggaagagagatcagaactgtttggcctccctttctcagcctcctgcctccaccccaagtcacatatactcccaagacctgacccattcccaaaatgaatgatcagcattcgtccactaaccagaagcatgtcccagctctcttctgtgtcccaccattagaaaatcaaaagctgactgtagctttgatttagttgcaattaggaattagtatcttcttcttcactaccaatttctcccagttaatggaatatgaatggtaattccagaatcttttatctcctttctgactaccatagcccctattcaaatcttcagcatctcacatctagatgactgcagaagtagcctactggtcttctctgcttagagtcacattccaattcagctcccaccttgcattattctaatatacacccttgatcatattgtgtctcgatcaaaagcttcaatggtcaagtactgaacattgcttatatatcactgacattgctagtattcctgctataacaagttctcccttattcagaatccatttaaaatgtagtgcaaaacacacacaaagtgacagtaacctaagtgcccaccaataaggaattgttaaataaattctagtacatccatgacatgagataatagcatgtcgtccatcatatggaataataggaagtcatttgaaagaacgagatgatggcagccgggcacagtagttcatgcctgtaatcccagcactttgggagaccaaggtgggcagatcacgaggtcggcagattgagaccattctggctaacccggtgaaaccctgtctctactaaaaatacaaaaaattagcctggtgtggtggcgggtgcctgtagtcccagctacttgggaggctgaggcaggaggatcttttgaacctgggaggtggaggttgcagtgagctgagatcgtgccactgcactccagcctgggtgacagagcaaaactccatttcaaaaaaaaaaaaagaatgagatgatggcatacaaataaatctaccacatatattctttgtttttatgttttataggcaaacaaacatttaggaagaacacacatcaaacagttataaaccgtagccacctgaggagtgagattaaggggaaaagagggcttctgtgtttattttgtgattgttttgtaagcgtctgtgttcttaaaatatgttacagcatacgcaggtattatttttaaatatctaaagccaataaaggtttataaacgcatttgtcatctaagagcttcatttagaaattatcactatatttttatttgaggtacattaacatatgtgtatgtataaacctaagatttaataatataatgtactcactagactgtgttcattaaaggcagagttggtatagtcaatttgcttttttattttcccagaatgtgtctcagaatttatatagtgcctggcatattagaagagacgtgtgtgtgtgtgtgtgtgtgtgtgtgtgtgtgtgtgtgtgagtgagatttgctacaaatttctctaacttcatagaatatgatggaacatgtactgtgattctagaatcatttctctattgctatacacaaaccatatatatgacagttttgcatatttgcaaatgcaaatatatacacaaccaaatgggagaatgatctgcatattgtcattgtgctgacaaacctgtcttgatcactgctacggtgactccaaatcactgagtgcttcgaaaaggacaagaggaattccatacggaataggcaattaggttttggaacaatgtgcacaggctggtgttaactggttcccgtgagtcagggccattccattttggggattaaacacatcagcagaatgcccctttctctgcagctgacaagggggagttccaccccatacactgagggagagggtccccagaatcttccggggagtgaggaaacaaattccaacccccaaacaacctgattggaaagggagtgtttttatatacacatgtctccgaaatccggccagcaaatgataaacatcagctggtgtttagctaaatgttaaaaatcttattgaggcaaaagcaatgctagaaaggaacaacaacgaaaaaagccagctcagcctctgccccacggcctcgatttctctcccaaatcccaggtagctgagaggtggaaagtctagaaacagaatcgaacacgtctaatctcttttacaacaatgttcttattttaacccatgtcatcaggggaaatggctgaaaatagtgacaaatacaacatcaataaacataataataattgatttcccagagatgaaaaatttgaaattattggccatttccccctagagcattggttgattaatttaatgttcatcttagtctttcaaagacatcctcttatgttgatctgctttgccagactttgtgatgggttttgcggtttagggcccagtggttaaagtatattgcacagttctgcagttttaaagagaattctgatagtttaaggatgactgcagccaacaacagcaacaacaaaagttaagacacatcaagcaattaaatttccagagattggaactggagtttttcatacaggatataagttcagtggctgtactactcagtttttctagcttaagtatccaagaaacagattttgagaggtacaacctctattcccccagagcacccaactttcacttaattcagaatctcaacacagagcaaggtgaatttcaagtaactattttccttcctctctcccttctttctttcccttttccccttcctttctttcttactcatgtttctcccctaccctctctcttcctcatttccttcttcctttctttcttccttctcatctttaaaccacttcaaagtttgatgtttgtatttatcctgagagacaagtgaaataagcattattatcctttttttacagataaatgaagtgagacacagaggttcagtgactttctcagactttcttgtgactgaataaacagcccagggaaagaagttttgaacctcctgagttccaggttagcactttttcttttcattttttattatactttaagttctggggtacatatgcagaatgtgcagtttattacaggtacacacgtgccatggtggttcactgcacccatcaacccgtcacctacattaggaatttctcctaatgcaatccctcccctagccccccaccccccaacacaccccagtgtgtgatgttcccctccctgtgtccatgggttctcattgttcaatttccacttatgcataagaatatgtggtgtttggttttctgtttttgtgttagtttgctgagaatgagggtttccggtttcatccatgtccctgcaaaggacatgaactcatccttttttatggctgcatggtattccatggtggatatgtgccacattttctttatctagtctatcattgatggacacttgggttggttccaagtctttcgttagtactttttctacaagtagctggtcccagagcatgtcagggagaactccagccaatcccatcaatcacagctccgtccatcaaccctgtgagcacagactgactcttgcatggagtcagcatctgggtgtgcagaggcaccttcacttcttgtcccttcccaaatgccacatcactagaagtatctactttatcattttgaacatgtaagagtaaacctgcttccacattcttaggaactaggaatgcatcagacctctttatcagacctcatctgcacaggtgagcctaaaccccttgttttggaaatgtttgatatggctcctggcactgggtgcctggtcccttccctttagggtttcccttacttttcctgggaccattgctatgcagtgtaatttctcctgtcttcagcccctaagacactcggcctagtatccttgtccccataagtctaccggaggatggtgatttccactgtctcaaatgcatgcactttgacctcacactcatttttctgcaccatctcagggtccctaccattgtacccaggaggtataaaaaaccttctgtgaagacatatgtagccttcaattaaagcatttgtaattatttcccaggacagttattcatctacaaactcatcgtcagtggatttacctaaggaaagcaaacaacaagaggtaaatcagggactttcatgaatgcaaacagtcttccctgtgacatcttgcacagaataactctccctaaacaagggtcaaggtgagatggcagcactgttaagtcattaaaggccaagcttcctaggtcatgtcagtatcacgcatcaataaaggactctggtaagtaaatgaagccatttctctaaggaataaaaaaaaatcatcacttttaaatgcttaagaatgcattttgtcaacactttttgattaagatacagctttctgaaacatatgagaaataaagtaaagaaaatctcttcctttcctttccaaaattctgccttccagagcagttgaggcagagtgatgctgggaatataagaaactcacagaaacagtggggagggcagagctggggaatcgagttagagcagcagacacagcctgtgtcactgagccatggttccctgcacaggccccatttataacctggtctttaactttgtttatctttgtggacattcgcagaagcatcttactttccagaagctggggccctataatcattatctgtctttggagaaaatgggattatgtgcatttaattgctcttctcagaaagtcgatgttgtaatagatcactcttcactgaccctcttctccaggtggggcttctgggttttcacatttttcccttggccttggtgttgtaaaaaaaaaaaaaaaaaaacagtaaaggtgggcttcttggtaccaaacctcaaccacaagcagaaaggaagtggagaaggcttaccatcttctttagtgtctgagattgaaaacccccagctgtcctaagaatgaacacctgtttatggaagtgaatgcaaattgtggaggtttccaacctgtgtgcatctgccagggccaccacaacaaagtaccacagactgggcagcccgaaccacagatgttcatttctcaccgtcccagaggctggaagtgtgagatccaggtgttggcaaggttagctccttgtgaggctgtgtgggaaggctctgttccaggcctctgtcctgggcttgtagatgccatcctctccctgtgttttcacactgtcttccctctgtgcatgtctgtctctgtgtccaaatttccccttttaccttttagtgaggacaccaatcactaggttagggctcaccctatagacatccttttaacttgatgacctctgtaaatatcctatttctaaataaggttacattttgaggtactaggaattaggccttccaatgtgtgaatttgacagggaatcattcaacccgcaacacagctcaattaaattatcccaggtttcagacagaggatggtttggggtgaagaggaccgtctccccaagtttgcagcagctgtgcttttcctgtccgtctcttgtgtgtgatttcacctccgcagtcagctttcagctctgaagggcaatgactgagggctctttgggtacatagaggtgagtcgttctgataagactggggaagatccaagaagacccctggatgtgccagtggactctgaacgttttgcttggctaagttctgatgtgacgtccccgactgcaagtgtggcatgacagaaaccaaggggtgagtacggaagggagtggtcaacaaagacatccatcgggacagcaattaagactcagagaggccagccatggtggttcacacctgttattccagcactttgggaagctgaggcaggtggatcacctgaggtcaggagttcaagaccagactggccaacatggtgaaaccctgtctctactaaaaatacaaaaattatccaggtgtggtggcatgtgtgtagtcccagctactcagggggctgaggcaggagaatcacctgaacccaggaggtagaggttgcagtgagccgagatcaggccagggtgacagagcaagactccaccaaaaaaaaaaagactcagagacagccagctgtggttccagcctttcatctaataccatgtttggctaacactaccctccctacccttcctcctccctacttctccccagacaaaagcttttccttcttggctgcacacatttaccagacttcccaatattctggcctaagctgtgtctcagtgctttcctaagtgtaaaagtttcttatggctgctgcaccaaattaccacaaagttagttacttaaaacaatacaaatttattgtagtatagtttcagcacccagaagtctgaaatgggtctcactgggctaaaatcatattgtcatcagggctgcattcctttctggaggctttaggggagtccctgtttccttgcctcttccagcttctaaaggctacctgcattcctcggcttgtggtcccttcttccaactgcagtgccagcagcgtagcatcctcacatgtgtctctctaacactgaccttcttcttccacttatgagggcccctatgacaacttccatctgcaactttaattctccccttcctatgtaacataaaacagattctcggattaggatgtggacatctttttagaaggcagaggggagcatcattctgccaaccatactaagcgagacaaattccttcctacaaggagttccagtgacaactgttatgagaataaggtgtttatgtcatgacataaggactgaacgtttccactggggttttgtttgtcgttattgtttttgttttgatttggttttttgaaaaggggtctcgctctgtcatccaggctggagtgcagtggtgcgaacttggctcactgcaacctccgcctcctgggatcaagtgatcctcccacctcagcctcccgagtacctgggactacagatgcacaccaccatgcctggctaatttttgtattttttggagagatggggattcaccatgttgcccaggctggtctcaaactcctggggtttgagaaccccatctggggtttttgaacaaaaacagaacctggttaaggacagtttggaattcagtgaaccaaaacatgaaggaagaatcagtgaatgagaaagtaaatacagataatacgtgtaagtatgtcaacagtttttaggaaagtacacaggttattaatcttagagaggagagcaagcaccagggaggggtgagcgaatttgatttaagtcttaattatagattgtgcaatctccatgtccaaggaatcaaaattcctagctccatggatcctcttcccagtccacttgccaatcagctttctgaagcaatctggcacaggaaggagtgggagactgatgagcagcccagaccccctgctagctacattgcacagtccctggaggatccttccagggagttgggtctctatagagtactcccaaatcaatcaactccctttagccaatctctgtgctgagccccatggtacagcacccttgggatccagcctatgcatactctccaagccctgctggttcacgctacctgggctttagagtgctttaccttcaattatggggcccagcacagcctccactggggcatgctgtgctataaccatagtgataggtttaagggtcaaaaggggtggtgtaggcacagactgaggagatgattctcgttatcttgcagaggagaggtctctgtactatctccaggctagaggggagttctagctcttcccaggaggtgtgggctccttttgcaacttagagggctcaggagaacccagagattcaagattttaatggcatcaacacagattcctctacccgagcagagctggggatgaggtgaggtgaggtgagggaggcatctaggggacaaaatttcaggacttacatactccctgcacatgcatggacctgagagtgaacacctccttaaattttgcaccatcggcccctggcttgcctcaccctagctgctgccttgcatctaagtgtcaggtcctgttctcttccaaccaggaacctgactttggcatagaatactgaccttgcttggtatttaacctacttcagcaaggaccccagaagactgcataaattggctattaggacagagtctcaaagcatgagaaaagtgatgtctgaacttagtgaggttccgacgccagagttgctgggagcaactgcagggaacaagctggagaggagatatgacagaagactcccagaaaacccaccagatcatcacattccatgggaagtcccctgcagaaactgtctggatcctggaggatgatgatagaccactcaaactcaactaagcagcagccattttttccttcaattcctgacatgacatctttgttggagagatgaataatgtctcagggacattctacacagccattgatttggtgaaaccattcctttctaattctatcaaaaaagaagatcagaagctatttgcaatgaaatagaaagaataaaaaatattcctttacagttttgccccaggactatgttaactcttgcacctttggtcatattatagtctgtggagatctggacatctctacacctgggcattccatagaatgtcacactgatatgtgatatagatgacatcattctagtcaggtcaaatgagcaagaattgacaagtacattgcagaccttagtaagatacacatcttccagaggatgacagataaagcccatgaagattcagaggcttgctacatcaataaaatgtttaggagtccagcggtcaaggggtatgccagggcaccttatccaaactaaaggatcaaatattgcatcttgcatctccccccatgaagaggaaagcccaaaggtgaacccaaggaccaacttataatattctccactagcaatgatcattctaccattagcaggagaggggattaccaacagtgctaggttttctgtataaataaacatttgttgaggctctccaaagaacattagcaacaagaaagaacagacaacacaaaacataatcaaatttccaaggtagtacatcagttagctattcctgcataacaaatctaaaacttaagccactaaaacttagtggcttaagacaactaccatttgcttagctcgtgattcagtcagcaacttgatctgggctcatttggatgggtaccatgattttgcctgggctcattcacacatctttgctcagctgaggagtcagctaaggattggctagtttggggtggcctcagctagaacatcttacctttgctttatgtgtttgcttatccccagcaagctactcttgtcttattcataagatatctgggcagggttctaagaaagaatagtcacatgtaagacctcttgagttctcatgctaggctcacaaagggcacaccatgacttctgctgaattctattagccaatgcaagtcacgggccagtaacagattcaaaggtagaggaaatagactccacctcttgaaggaaaagttgcaaagtcacattacaaggaacatggatacaggggaaagtgaagagttgtggcagtttttgcagtctattaatctgctggattctgtatgaattaacatttatgggagcttccaaagaagagcagcccctgagagggtgagagaagtaagagcctgatcaaatttctggaccagtcttttcaaggcaagagtcagaaatttctaaacagatttgatgaccctccttagaaacgcagcaggacaatgtggccccagtcaatccctgacctttctctgtattcaatcctaccctctgaagtgacctctgtgtgttccctgtcctcttttatagtcaacttagaaatgactctatcacttctgccttcagaacagagcaacatactgaaaaaggtagacaatgtgttcaaaaaatgggaacaaatttctataatctgcctgtcaccctcctgcatgatttttaatgacattctttgcttcaaaggaaaataaaaataaggaagtaatctgacatatatactgcacttaaatgctagtaagtcttcacacacaaagaaagaaatagtaagaaaagagaaaaccctaaaaatattgaggttgggagccaaatgcagcatatgtttttgagaatctaatccttccagtgaaactcccagacagctgtcagagtgagttcagtggtgcggtggatgaggtgataagacatggtactgtgtaaagctccaccccaggcttcatcattggagtgtcagccatcatccttctcctttgcaaattggcatttaatgaaacaaagcacaatttcttaaatcccaaatcctatttttacttctatttgccaagttattttctctgcttttacttctcctgattttcctttgtctactctttttttttttctttttccttccccattaaggaacgaggattttcaagctttgcttccttatcaagctaaaagtccaaagaatcagaccttttggtttcccttttccatttcaagatatgatgaggtcaagtagatttgtaaggtagcagaggtgctctgttactcaatcatggctccaagaacaggaatgtggaagaaaaaaaaaaggaagtaataaggcctctccctgttccaacccctttaaaatgtagatttaagaaaaggtgctagggagtcaagcaggaggaactaaaagagctttttcatttaaaacactgagctcagagcttgaagagaatttagagaccttctagctgcaaaccaatctgatctctctaaatttaagcacatcccttcctgggctcaagaaaacattgtccacaagagcacctaccctgaggacaagtcttggatagggatcaataagatactccaaatcaaacttgccctaatgagctttatctattaaaaaaaaaaagaccaaacaatggaaggcagcatagcatggtggttaagagcacagacccaagacgtcatggatttgaatcctggctctaccagtgttatgggttgaatgtgttctcaccctccaaaatccacatgttgaagtcctaatccctagcacctcagaatgtgacattatttggagatagggtctttacagaaggtaatcaaataaaaatgaggtgattagggtgggccctaatgcaatataactggtgttcttatataaaagaaggaatctggacacataaacaagcacacagggagactgccctgtgatgataaagactgagattggggtgatgtgtctaaaagccaaggaatgcgaaagactgcagcaactcccagaagctgggggagagccaggaacagatcctccctcacagcctcagcaggaaccacacctgctgaccccttgatcttggacttctggcctccagagctgtgagagaataaatttctgttgtttaaagcacctagtctgtgctactttgggcagccctggcgaggtcacgcagccactcaccatctatctgtgtgactctggcatggcttctccttgccctgtctgtaacatgtagatgacaataaatgtctaagtcagagggtcgttaggaacactaattaaataaattaacatatgcaagtgtttcaaatagaagttgacgcaaagaaagaggtatatgaatgtattagtccgttctcacgctgctataagggcataccagagactgggtaatttacaaaggaaagaggtttaattgactcacagttccgcagggctgaggaggcctcaggaaacttacaatcatggcggaaggagaagcaaacatgtcctttttaaaatggcagtagcaaagagacgtgcagagcaaaagggggaaaagccccttataaaaccatcagatctcgcgagaactcactcaccatcacgagaacagcaacatggagataaccgcccccatgattcaattacctcccaccaggtccttcccatgcatgacatgtggggattatgggaactacaattcaagatgagatgtggttggggacacagacaaaccatatcaatgaatatttcttaaataaaaaaaaattaaaaccaacatctgcatgagtcattataggtattattagtgaatctgcttgactcttcagtcagtatggtattagagggaaaataagaaatcctttggaaagccaaaatgccattgcttattccaagcactgtctacaaattgttataatcagagctatgttgttttctttgtttttctttaaatcgtttggatctggcagtgcccaggcctttaggtttctaataaattattaatctaagagttaataattcaagttaattggtggtataagccactttctctggcaaatgtgagcaaaggtcacaactttttaacagcaagggtgaaaccttttctgaggttttttccctcccccatggtctatcatggaaatattaagatatgaaagaaaaattttaaccagagctgggaaagcaagataattccaaggataaaagtgtagactgtcagccatacttcctggccaagcactgtctccatagccctgctggaggaaaaggaggtctccagggaattcaggggactccagccccacaggagcccacccaagaaggacacagccatgcaggtttgtaaacctttgacaagacaacttataatcattaaacatgttgactcattgatcaaaaaagttttggttttttgtttttgtttttgtttttgttttcagaaaataaaagaaggcatttaagagattagctcaccaatgggatttttcacaaagaatgataattttcctaaattacaaggcacaggcttaagaatagagaacatccattcatactgggtgacagccatagaatgctaagcaaaccccttccaccactgacttctttgattttaattaatgtatatatgctctgcctttttgtttccagaaagaatttcaggtaattcctgattgcaggccgcagaagccaagaaataaaagacttcttacccgaactaatgtgactttactttccagctcatggatttgcccctagatctgtgaagcagccacaagtggcctagctgttctgggtgttttataccttttttggccttaatgcttatttgcaaggttcatgtcaagttacaggctgatgtgatgaaatgactttttcccatttggaaaataagattattcttagtagcttgtttcagtcttgattaaaagatagatgtaaaatattcaaagaatgatgtctgaagacttaaagataaaatttacatggaagccactagtttaaagagattcagtcagctcctccagctcttgtttttctaaagaaaatttgaatagcatatgcttttcattgtgctccttttcagccatttacatattggggaaatatatatttggcaactggtcctatttttaggagtccttgaaacttgccctttgaaaatgttttcatttttggcacatatgtgtgtcttaagcagaatgaaaacacaaagtaaaaaagaaaaatatgtacaaaaaggaatgatttttccagccctatgtagcacaataagaaagcaatcattcagtggtgactttaaaaaatggattcttgcctggattttccaacgatttccttctaagtgagcgtttctctgcagaactgaactaatgtaaagagacagtttgttccagtgccagaaatgaaccagcaaaaaaaaggacggaggctctattttcataggaggaagttaacaaaataatacccactctgtttctctgcagcctcttgtgtcatttcagaagaaagtgccatatgcccattgcgtgatttgaagcgtgtattcccagcctgactcttggtcaccactcgttctgttatttgcagtcagtaacaaagattcatccttgtgtccatcatgcaacaaggagaatctttgtcacttagtgtaattaatagctggaccttgcaaaggaaggtgggagaaggaagccgttcatgcatagacctggataaattcagaacaggctttgcggatctttgctgccttttgaccaattaaggtgccagagccccagcagaagaggaaatatggtaaacaaagtgttttctctggggctgtgtgtgttataatcccaagctctgtaactgtggttcaggagagctctctaactttccctatcaagccagatgaccatcgactcccctctacgtctatgtcctatttcagtgtatccttcccactttccttccaccacactgtcttcaccagcctctagatagataccactataggataaaaatcaaaaagagaggccttatgtttgatgagtgcctcccctagactatgtggttaaatcactcagcaagctttcagagaatgtgtaatgggccctgttttcaaaatgagaggactgaaaagaggtttagagaggccagcgctgaggttaggctcagggaacagatagaaatagccgattcaggaccacatcaagggctctctaatgccgggattcttagctcacttttccctgtattgtgatcttttctttcactttttttttttttaatagagatggggtcttgttatatttcccaggctggtcttgaactcctggcctcaagcaatactcctgtcttggcctcccaaagtgctggggttgcaggcgtgagccactgtacccagcctccttaactttctgaactcctacttatttatttttgtgaccctacttctttattcttcctcctcctgtacaaaaatggctggatggattccacttgtccctggacctttaaactcctgtcctccatacctgaacaaatccaatttatctctcaaagtttcagagagttcctaaatactaatagttcctcaccatcatctcacttgcaatccgtgcatttcagagttcccttcccagaggccatttttgcctttaattagcaaatgcatactattctaggatccatgagatttttttccttctatttctgcccaaggagaaagcaaacacgtactgctgcatttgccatcctaggtccataatctctctgatctttcttcacctttaaaaatctcacctcatatatcttttcttaggctcatccctcaaatattcaggttatttcccccaggcttcctctcacctctctccttgtggctacactggctaggagtgtccagcctcattcaagagggggtcggatctcctttccctgccctgttgctttccacggtggaaccagcatcctccctgactccctgcccctcctcaggaaccacaactccctgtcgccctcctctgaacaggattgttctccatccatcctcctccctgctcagacctccatccatagcactgtttctaaacctccagctccctctcccttatcccatctgtgttagcctgttttcacactgctgataaagacatacctgaaactgggcaatttacaaaagaaagatgtttaattggactcacagttccacgtgactggggaggcctcacaatcatgatggaaggcaaagaggagcaagacacatcttacacggatggcagcaggcaaagagagagcttgtgcagagaaacttgtttttaaaaccatcagaccttgtaagactcattcactgtcatgagaacagcacaggaaagatcggcccccttaatacaatcacctcccactggggtcctcccatgacgtgtgggaattgtgagagttacaattcaagatgagatttgggtggggacacagccaaaccatagcaccatcttttcaaggatccttttccacacatctcacagggtctgctcctgtcctagctggctgaacagtcatcctaggcttccaaagtattgccagtcaatgttcatagctctctttatccaatttgggaactcatcactgcctctgaaacccagctgcttcatgataggctgcagcaataacaattttggaggcccagcccctccatgagtttgttctgatttggggtgtgcccatttgtgctctacctaagctcctgaggttagggactcctgttagtcttagtgactctatgtgtataataaattataatgctacaagtgggcttaaattctaattccttttttttttttttttttttgagactgagtcttgctctgccgccagcctggagtgcagtggtgagatctcggctcactgcaacctccacctcctgggttcaagcgattctcatgcctcaggttcccaagtagctgagattacaggcacgcaccaccatgcatgactaatttttgtattttcagtagagacggggtttctccatattggccaggatggtctctatctcctgacctcgtgatctgagcacctcagcctcccaaagtgctgggattacaggcatgagccactgcacccagcctaaattctaattctttagatatgtagaaagcatagtcattccttccaagtccataaaagtgccttgcccacaacatgtgtgttatttttcaatccaaggcactctgctgaaagttcagaccagcatggcaagctgcgcaagcacaatttaaattcctaccacaccacaccattttggctgatgtgttcctaagtatttaagtcactgaacattcccttcttcccccccccaacccctctcacatgacaccaccaattttgccttaagggaaacctaaatgcagattcctgtgacctggagtggacaagatagagagttagttcctgctgtgatcctactatcttccatctgtagaatctaccagaaagtaagctaaaacttaggagcaatgggaaatgaagcaaggttgcccttaagcccatttgtctgccaagacctctctgcaagtcctagactgaattgccttccagatgtccaccaagataaaaaatgtcactacttcaggccaatttctttgcttcctccccacatgtgaaaccagacagagacctgggagttatcctggactccttcccttaaatgatccctcccgcacagtccaagtcctgtccatctcttgctgaacagatcacctaaagtcacctgagcctgtcctctgctctctatccccatcacatcgtcttcagtatagaattaggaatgggattgcagtcccttcactgccttttacctgcaccctaggagtatctacccttcaccaactctctgttgcttacaccatcaacttgtggagagctccaggcctgagagatggatgtgggggtgactggaagctcagttctcactcagcccctttgtcactcacactctgcctcagcattcacagcttaacaaagaccaatgcagccttccggtagacccataaatggaagctatcaggaccatggtagaagctgattcacattccataggggcatgcaaggttttccaagacccagcctcctctgagttttaatttgtagaaatactggactgcctgtagttccccaaactcaccagcctttgcacgtgtgctcccagcacaaagctgcttcccacatcccctcagctccatacaacccctccgcattactcatagaggaaaatctatttacacattttgcttgctcagatgcaacagcccctaggatggccttctgacttcaactacctcctccttatccctgtcttagtctgctctggctgccatagcaaatactacagacccaatcgcttaaacatcagagatttatcttctcacagttctggaggtcagaagtctaagagcaggttcctggtaatggctctctttctggcttgtaaatggcaagtcctcaccatgtcttcacgtaacctttcctcagggcctgcccacacagacagagggagatctctggtgtatctttctcttgtttttttaactggtgaccaatttattaaaatagttgacttaagtatctgcaatggtggcttcaacctcaagtcctcgctcaatactgatggaagtcatccgctcaacaatctcagaagggctgtgcgagtcaatgagtggcttgtggattttcatctggaaatgatcccatgtcttagaaccttcacctcaaggagtttttcttgtagtaattctcaaaagtcttggtaggcattctaactggtcctttcacttcgagattcttttcctttgctcctctgttcaagtcagcacacatttctccagagattttatgtggcagctcattagcgtgattcgaattcagcaaatcaccacctccagctccatgggtgtttttctgggatctttaaaagccatggctgcagtgcagcttcttgaccgacttgttcgttggcgagagtgaacagtggtgaatcaggagcaaaaagctattcttttttttttcccataggttacatgactaagttatttagtggtgatttgtgagattttgatacacccatcacccaagcagtatacactgcactcagtttgtagttttttatccctcacccccttcccaccctttcccccgagtcctcaaagtccactgtgtcattctcatgcctctgcatcctcataactcagctcccacttatgagtgagaccatatgatgtttggttttctgctcctgagttacttcacttttagtctctaatctcacccaggttgcagcaaatgccactaattcattcctttttatggctgagtaatattctttcctctttgaaggccgccaatcctatcagagtaggaccccacccttatgactgcattaaaccttaacctcctaaaagccctacatccaaacacagtaattcacagcttcaacacaggaattctgaagaacacaatttggtccatagcaacccataccccaattccctgatagaaaacacattacctacatacagaagaaaaatgactttccttgagtactctacaaattagtttgtttagtgttttattataaaagttattatttgcaatctatcttactataattgcactatgttccattattattttttgataagtagaaatgcaatatgtttgcaagtatgtgttttaattcgtaacttatgaaactagtaatagctggctgttttttacctaaatatgtccattttatagagttaaatctaatatagatgtgtaatttatctttatacattgatcaaccagataaacttgtaaattaaattttatttgctatgtgcattattcgttccacaaaattctaacgaaaaaggttaaaaacaacccacatgattatgtaaacatcaaactttattttatgaaactacagaagtttaactgaagtttcactgttgccatcaatctgtgagtcccagcaggaaaaggaattgatgggctgataagggtccacttcacctgcttttgaaggaaccacacctcttctctttcatgaattattaaaatcgagatacaaaagttgccattctggaaatggatggatgctgttagctgtcatgtgacaagtgaggttttatttatttttagctcacagttccctctcacatacatactgagagactgaaaaaaatgctggggatcattaaacatgactggttttatggtatctaactacatcttcaacgtttactaagactaaaatttaatctttaatctcaattatattacacatcatgaataatgtggacctgaattccagctcctgatttcttatgaagtcagtctacaaaataatcaaattaatttatacaagttacccaggaaaaacggtttgctgactatggttacatctcacttgcttaacttattcaatgttaagcttaatttccacaagaggttggagctactaagagttgtttgttaagaagctgcgaaaagagcatacttaggtgtttccacaccaaaccagactgtgagccccagaaatggacatgagaggccttacaagaccttcttctcctttacagccatttcctaaagcaaatattcaaagtctgcattacccatgagttgaaccatcctatgcatacaaaatggccactcagaaggattacgtaaaagctgccattcctttctaatagaaatgagtttgtgcactgaaagtcagcagttcatccacattatatcccagaggactaatttctgcagctagagaactggaaaacctcagcatttttcagggagaacagaaacgttatcctatagctctccctgcaccatcctaccctcctccttgcccacagccactgacgagtcagtgataaaagactccatcttcacctcaacttggatttcatttttactctccactcccttagacttgaggttctagaacattccttgcttttcagactaccttcaacttgatccgagattcaaacaccagtttccctggtgtttttctttcttattctcagaaacatattctctgctagaccacataaccattaactccacacatcctaaattctcttacaaaaaagaaaaaaaagagagacagggtctctgttgcccaggctggacttgaacccaaggcccaagcgatcattccacctaagcttcccaagtagctggaactataggtgactccacacattctgaagaggaagctagcatcctccctacacagcccatttttggtcctattatagttctaccttttttataaatgataaactgataacggcttcaagaaacaagtaaactttgaaagattgcaaaggaacccttcccttaaccctcctccatctcccctccataattcaccttattttccagagcctgctctcctcaactacctcattccaatttactatatgttggcttctgaagaaagccaacgtttggaagccaatgtgtggtaaattgctcattgctaactgaggtgtatttaagtttgcatagtgactattatgagcagtatttcatacattcttagcagtcagagaagccttcctgcgaacgaccaccactcttctacctctttttcccctcctctcccacccatgcacacatccctttctgtttatggaattcataaaaacatgtagcaagctgaatctaaaaagtccctggtcccttctaaagaagtctgttataaagagtggaagaaacagccaaagaagctattgccaatgaaaagagagacctcgaaccttaatattgtttcccatgtctttgctcaacactttggaagagattttatgggttttgtttttccagtacagttgactcttgcacaatatgggtatgaactatgcaggttcatttatacagactctttttcagtaaaagttacactgaacatgcctcctctcctgacctcccttccacctcctccatctctgctgcctctgcccctcttgagacagcaaggccaacccctccacttcctcctccttatcagcctactcgacatgaacatgatgaagatgaagacctttatgatgatccacttccactcaatgaatagtaaatgtatttcatccacctttttcttaataacattttctcttctctagcttactttattgtgagaatgcagtacataatatatatatataacatacaaaatatgtgctaattgactgtctgtgttatcagcaaggcttccagccaacagtaggctattggttaagtttttgaggagcaggctattggtgaagttatacatggattttcaactgcattggtggaggaggggggtcagcatccctaatcaccacattgttcaaggatcaactataatttctttgctgtgcccaaaatttgagaggtacttataactgctggtagaatttttcctgtgtaaaaataggtggcatttgtctgagaaaaccaaacctgggaaagcacagattcaatctgaattccaaaagggtgtgctttcccatctgtacactaaaagatttccctgtaattccatttgctggtgactgcacatttttcaaattaaacttgaggaaggaagagaacacttgtccttgagaagtttatagcaacagaagcaccagaatagaaactttagataacttagaaaaattaaacacctctaaacagcaccccaaaaaagttagccatttttaagatatgaacattttattttttcttaattagagcattgaatatcataagtagatcaagtgtgtttgctcctgttattaagagcaagaaaggaagattggccaggcatggtggctcatgcctgtaatcccaacactttgggaggccgagacgggtggatcacttgaggtcaagagttcaaggccagcctgaccaacatggtgaaaccccgtctctactaaaaacacaaaaattagctgggcgtggtggcaggcacctgtaatcgcagctactcgggaggctgaggcaggagaatcactggaaccggggaggtggaagttgcagtgagccaagatcgcgccattgcactccaacctgggccacagagtgagactttgtctccaaaaaaaaaaaaaaaacagattatccttttagtgcttgaaagtgctctgccctttaaaaaatataccttacagagactagagacatataactaaatacaatcttagactgagtccttattgaaggaaaaaaagtgttataagtacattgttgggtcaattaacaaaactggaatatggacagtaaataagagtattatattgaggcaaaatttaccaaagttgataagcgtactacagctgtgcaaaagaataaatattcctagtcttaggaaatacactctgagggatttaggggtaaagggccatggtgtacgcaacttgcttgcaaaggagacaaatatattttttctatgttatgcatacatgtatatgtgtatgtatggaaagagagagcaaatgataaagccaatggaataaaatgtccacaacaggtgattctggataaagggtatttgttgtgcttctcaatatttttactattgcaatttttctgtaatttgaaatgagttccacactagaagtttaacaaatatacaccttacagtttgaaattatgttttaaagaaaagttggaaagcggagagacaaaagggggaaaaaaacaggtaaaaaattaatttcgggaaaataattatccacacatctaggtggcttcttcccatcttctgagacaggtcagcatcatagatgcctactgtactccagtcctcagcctcattcttatctctccagtcttcctgatcaggaaatagcttcaaaggtcagccaggttggctcaaaaaatccacagacaaaatgggtgaaaatgagtatcttggaaatggtgtgttgcatcctcttggtcctgagcactctgcctcctcgtgctgctcctggagccaccactgaatcaggcaaacacatttcttttctttcatttttttttgttttggtttggtttggtttttggtttttgatttttgttttttttttttgttttttttttgagacagagacttgctctgttgcccaggctggagtgccatggtgtgatcctggctcactgcaacctctgcctcccgagttcaagtgattctcctacctcagcctcccaagtcaccgggctaaaggtgcccaccaccacgcctggctaattgttgtgtttttagtagaaacgaggtttaccaaggctggtctcaaactcctgacctcaggtgatccgcccgcttcagactcccaaagtgctggaattacaggtgaggcaaacacatttctatgccagacctctagggggaactccttgggattgacgctcaaaggcatgaagctttgaatttctctctcaatgttacaaaacttaaaacccccttcgaaatagatggctacgctgcagaccaaggtactaaacaatattttattataacaataatcattagtgatgtcaattgagaaaaatgacaacacaagtctcaatcattttaggaagtttatttgccaaaggtaagaatgcgagcctgggagacaggtctatgcctttctccaaagatgattctgagggctccaaatttaaaggggaaagggcaggatattgcaaagtacacaattttcacgtaagagggggctaggaaaaattagtcattcgtgcctttgtctggctcaataaatctgcattttttttatgtaagatgacatagacaaataaggcagaggaaaaaggcaggcaatctgcattttacataagataacatagacaaaatggggcagggaaataatcagataggcatttgggtcagttgggcaggaggatggctgcacctgtaaagataagctatcaatttgcattgccatggtgaaattttaacagaaacaccttagagtaaagatcttgcagctcaccaggaatttacttgtaggcaaaatatgggggagacatgtagcttttcatcttgtagccatcttatttaggaatgaaaaacggggaggcaggtttgggtgaccccgtccctagctccacttttccctttggcttaatgagtttggggtcccaagatttaatttcctttcacaatatcattctattctaagccactgaaatgtgttaactcatttaatcctcacaacaaccttgtaagagaagtatatgattacttccagtttataatacaaatgaagaaatcaaagcccagacagaataagtaacttgcccaaggtcatgcaactggtaagccactgaatttgaacccaggaaatttgacttcaaagaccacattcttaattaccacactcaacttctcaactgcaccatcctaagacccagacatcaaccttcatctgttagccagttagaacaattcaaattatcctggttgagtggcctggatgtcactacagatgcgatattgcctttgtttacaatcccattgtctaagcttcataaggcaaacccctattgaaaagtcaagtttactccatggttgctattaaatttctggggccatgttcagcatttgttcttttcacccccgtcaaatgaactggatagactaagcaactaattgattttctccataaaatcttcaacaattttctcataacccaaaatgatctctcccctctaaatccattatgaatcatcaggtggtgttcggcttccataacaatagacaatgtgccatttccttgcacataatccctgggtggcaggacctaagatttgttcggttggcttagctcatacttcacatagattctgatcaagaaatctattttcccctctctgggaagcaggagatccacggctggctttcatggaaaacaagcaaccacttatctcatgggctttccagtctcaaaagaaagccccacagctataatagggagggtgctgtagtagaggttatagaagtagtagtagtaatagtctcatagcaccagtaataggcgtagtggctaacatttcaccaagtatcaggtccgactttaaatactttacctcatcacatccctatgatgtaagtactgtcgtatcccattttataaatgagaaggctgaggcacaaaataaggcaggtatgtgggcccttggaaagtcagattttgcagccaccttgtattggtcagacagtcttaccactgtagcaaacaaccccacttctcagtagtgtcacctaatgaagattcatcccccagtcatagcacagtctgatgagatactcagcagcatccttccacaaggtgattcagaagccctgggccctccctcctagaggctccatcatcctctggtctttggagttctccgtggaccatgtccagttgacagagaataaggaggcctgaaatatggtctcctgtgtgatcaagagaaaaatgaacacattgatgaacacacggtatgctctcagagcaatcttagaagcgtgggtcacttagggacagaggatagacagcaagagaagaatgctggccccgaccacctctccagtgtgaatgccaccttccctccctcaccgttccccaagcagagaaccaacattcacacaaatcggattatgacttctcgtgttttcaagaacggtcagtcctctgagtcttccaggccagagtctccctccacaactaaacgcagaagtggggtggaataaaggacagaggtacgtgaactttctctgactcacctgggcttcggccggaaataagcaaagtgctgatacctgacgtagccgtgacctgggcaaggtattgtttcacatgatcctgttcctgagtgcttaggcaaggctcgaccagcctgagtctcactctggctcctaccacaccttgtttattaagtcataaaactttcatgaagttaagccaggcatagcggggctcatctgactacagctacaagcctccagaagagtgctggcactaagacagacatttgtcgaagggtgactacctctctgcttgccattcaattatgtcctgtttgttatgaattttatttgattcctccatcagaatttcctttccaattatggaaagtgaagaggtatcttatcaaacatcagatccaggacattcagacttccatgtgtccagaagacaaaccctcgtgttgcctttaaaatacctctccgccaggcacggtggctcacacctgtaatcccagcactttgggaggccgaggtgggcggatcacctgaggtcaggagtacgagaccagcctggccaacttggtgaaaccctgtctctactaaaaatacaaaaattagccaggcgtggtggtgggtgcctgtaatcccagctactcaggaggctgaggcaggagaatcgcttgaaccctggaggtggagggtgcagtgagccgagatcgcaccattgcactccagcctgggcaagaagagtgagactccatctaaaataaataaataaataaaatacctctcaaagatcttaactttgcctatttttattgtttcaggagacacgtatatagtgacgccactatccaaagacatcttcaatgatgcagcatcattaattcaatgttttctttttttaaaaaaacttttgagtcaacgtaactttttccctgactgttttgttccttgatgttcttgcctttacctggtgtcaaaacccatctgtgagcacagttagataaggcttctcattgttctcagggtgcataaaatccctctccctcccttccttctctccctctccctgtgcctttctctggctctctctttttctgcctacctcatctctacccttcctccttccagaagctttcaaatacaaattgagaaagaagaaaactccccaaataaaactatacaagcaaatccattcggcataatatctgtgtcattctgtatgaaaatcattaggtaagtgtgacctgagagaattagagaaaataaataggagcaactagaaaccaatgcacctggtataactaataaagaaaacatgagacttttagtgaaaggagttaaataagaccactgaaagttgatgtgataggaaccacatcaggactaagcaccttttaaataaactaatcctgcactttaggaaatcaaaactacagctggcagtatccagttcacatcactgtgctgactgcctaccaaaatgaggttttgtgttcccatgtatatcccactcacaatagcaaagatatggaaccaccctaagtgtctatcaacagatgaatggataaagaaatggtggtatatgtacaaagtggaacactatttggccacgaaaaagaataaaatcctgtcatttgcagtaacatggatggaactggaagtcattatgttaagtgaaataacccaggctcagaaagatgaatattgcatgttctcactcataggtgggagctaagaaaaggggagcacatggaggttgagagtggaatgatagataccagagactgggaagggtgtgtgggtgggaggcgggggcatgaagaggggtaggttaatgggtacaaacatacagttagatagaaggaataagtgctagtgttccatagcagagtagggtggctacagttaacaacagtgtattgtatatttcaaaataactagaagggagaacgaaaatgttcccaacacacagaaatgagaaatacttgggtgatgaatatacaaaaaccctgacttgatcatttcacatttatgcatgtcataaaatttcacatgcaccccataaatatgtacaaatataatatattgataaaataaagtgagtgctatgttacacactggggttggagggctaaatcagaagtgatctctgcccttgaggagggagtcagactaagggttcccctacaagatggtcaacgtgatgacagacacgcaggaagaacagaggactgtacttcaatgtcctggggacagggatgggatctggcatatgtaagaggaaacagccaacctcaggtgtaagcagagtagaatacaagagagaaataattagcagaaggtttgccaagatgtcacgggggaagtatgtggatagaacaaaggccgggggaacgggggaatgtgtggaagaagagtctggcctgatgtaactcagaggccacgcaagaggcacggagcaggcgaactttcacctgctgactgttctagaaagcagcacatctgaggcgttcttcactctctttggtgataacttcttctatccgaatgtagaggagaccatgagaaatgctacctaggatgaagttctgattaaccaagataaaccatctctgggagagtagaagtggcagaaatacagaagaaagcttctaccatcaccttggagtttcacagccaggcaggagagtgaatttgaaaaaggctaaagaaagctcagaaaaaaaattacggccaggtgtgatggctcacgcctgtaaccccagaactttaggaggccgacacgggcagatcacttcagatcaggaattggataccagcctggccaaccatggtgaaaccccccctctactaaaaatacaaaaattagctgggtgtggtggcatgcacttgtaatccctagctactcgggaggctaaggcatgagagttgcttgaaactgggaggcggaggttgcaggaagctgagataacaccactgcactccagcccgggtgacagagtgagactccatctcaaaaataaataaataaataaaaaataaaaaataaggccaggcacggtggctgacacctgtaatcccagcactttgggaggccaaggcaggtggatcacaaggtcaggagatcgagaccatcctggctaacacggtgaaaccccgtctctactaaaaattttgaaaaattagccaggcgtgatggtgggcgcctgtaatcccagctactcgggcggctaacgcagaagaatggcatgaacccacgggcggagcttgcagtgagcgcagatcatgccactgtactccagcctgggtgacagagcaagactccgtctcaaagaaaaaaaaaatattacatagacttccatggacaaagtcatgagaaacgaagacaattcaagagaaattcaaggctccagaaaagtgaaattggttgtagtgatacagtcagaaataatgcctatatgactacttaaaaacatcttgcattaaaaacattttagaaattattaatagaaagttataaaaatgaaattaaaatcactcacaatttcattaaccggaagttttttctccaataaatacacttaaattggaaaatagtataaacagtacatcctacttttctttcacttagtataagagtatctgccattaatttagctttctttgaaaaatgtgacttttccaaaaaaataacagatcttggcgaggttgtggaaaaaacggaaccttatacactgctgttggtaatttaaattagttcaaccattgtagaaagcagtatggtgattcctcaaagagctaaaagtggaactaccattcaacccagcaatcccattactgggaatacacccagaggaatataaagcattctaccataaagacacatgcatgccaatgttcactgcagcactgttcacaatagcaaacatggaatcaacctaaatgcctgtcaataacagactggataaagaaaatgtggtacatatccaccatggaatattatgcagacataaaaaagaatgagatcatgtctttcgcaggaacatggatggagctggaggctattatccttagcaaaccaacacagaacagaaaagcaaatactgcatgttctcacttgtaagtgggagctaaatgacaagaacttgtgaatacagagaaggaaataacagacactggggtctacttgagggggagggtgtgatgaggaacaggagcagaaaagataactattgggtactgggcttaatacctgggtgacacaataataggtacaaccaacccccatgacacgtttacctatgtaacaaaccttcacatgtgcccccaaacctaaaataaaaattaaaaaaggaaatgtgtcttttcatagctgtgaatggtgtccattatatggatgttagacaatgattttagcacttccttattgctggaaagaggtcattaataatttattgacatgataaataacaccatgatgaacatcttcaaggcttttgctattccttcacaacagggtgggctcttcctcagctcctatgtgaatatggattgctgatgttcttacttggactgctgtgaaaatattcctggctagctaacgcacttgtctaaggaaaatactacagagcttacttttcagttatccttgataatagagggaaaaggagatgaaaacaggcgctatttcatctactttctgcttggcctaaaaatgcatgggaacagctccagagaattcccagacaccgtgggtggctctgaggggctatttttataataactaattttgttcattttcttttatgccaatcagaagtttggccagtgaatcttcccccaccctcctcattctagtctctataaaacagattactttttctttatacataccacacacataggaagggagaaatacacaagagatggaaatgcaactaactttgtccgggctctgcaagttgttcatgaaattacaaagccaagggaaaaaataaaaacactgttggaagagaagccagaactctgagctgaagcattggcttgtgtgttacagcagaagcctgcatgtggtcgacggttagagaagacagtagccatggggtcaagaggacagatgggcatgggcaatccaggaagccgagcctgtggtcagtggcctgtggggaagctgagactgtttttgtccacagttgagtaagtttgctgttagaagaaactcctttgaggcagcttgaggccttcatgaaaaatgcagcctaacctctaaggaataatgtctatgatgggtctcacgaaatctgcaaagaattgttgagcaactttaaaggctggtgtcctgcactgcctgccaagggtaaagccggtggacctgtgtatctcacaaatctcagaaacagctgattctttagagccctgttcaaatgaaaatactcccagaggtcttgcgactaggctgcattgctcaccactcagacgggagccttccatgagcaaaggagagacacaactttacaatggctccagctgcaaggaactgcattttttcaagagccagatgtgtttctccagataacacactgtcctccctactggaagctccagagaactccaggaggagaaggaagaagaggctttaaaaatgtctagccatgcagtgagtcaccaagcagctcttcgccttgttgttctctctttcctaatgtcactaaggtcacctctgaacagaagaacacccattgggggcccatggaggagagagcgtcctggggagcgcaagtaggctcctggctgcagccggggaagaggaaggcggtgaaacgaacaggctcaagtagcagcctgctcttggcaggagctactgctaattttccttggctggctctgactacctgtctgaaagcaatgcaatgcaggaaggaaatttttcaagagattaaactattattgtttcctgtgtggctgtcttcactggtgtatgaaaaaaaaaaaggctttaagagcacttgaaaagagatttgtctgaatagcagggtggttgtgattcatccccccctccagtcgggatttggccaatttcctcaggaaagtggtcgattaggacccatggatttatccgtggcctaaatataagatgtcataaaggtgattaatggtaagctcaccatcagagggagttaagagtttataaaagctatttttaacaggttggaaggtgaaaaaaactcatttgtcctgttgccaacatgtttcaatggttaaaaacctctttgtaggccctgataattcatgctaccaactgttaaaggtcgttgtattttctgattttacaagtttgtttgaaaaattgattcactgtgtttggctgtttatataaaagcaatgagggggaaggaaaagaccacgttatttccaccatgattagcgattgctgcgcgtggtgacacttcagtacaagagccttgtttcttctttccaccccgcctcaggggagaaaaggggcctttctgtttatgctcctaccacataaatagcaactgatggagggtgtcccaagacagttttcagagcccaaacaaaattagcctgaggttcccaaatcagggaaaattgcagtagttcagaaaatggaagatggcattgatggctcctagcagtgtccagtgtggttcctttgggtcacgtcacccagagatgctccaaaatgttacttcattctgacggtaattccataaacaaagcatccctttaaaatatgacatcttcttcccagtcacaaactaatcacctttgtttaaaggaacatatctgacccacttcttctcagaaaagctgaatttcctataaagtacctaccaaattatctaaaatgtgcatttaacattggcagaagaatatggtcatacactaatgaatagttgccgaatacaaaaggttgtcactgatgtctagatatttggatgtttcatggatggtagaaacatgaagtccattcttcaatgcgtatggcatggagtgggatgtggggaagggctaattattgaaatataatcaattgctatcaacaattttgagttactggcaaaaatagataaaatactttttttttttttttttttaaagaaacagggttatgctccacctcccaggctggagtggagtggcacaatcatcacacactgcagcctcaaactcctgggctcaagtgatcctttcaccttggcctcccaaagtgctgagattacaggcatgagccaccatgctagcgaagataagatactttcttatgattcttgcaatattttgaaagatgacaccaatcaacatgatacagtacagggtattccttgattaattcataaacattataggacagtctaatgtgccaagtatactcacaactagagaggcaaatatgaataagacttcaatgagctccacaggaagcctggtagatagagaagtctcttacaacagagggagataagagatatgatcatatgtatatatgcactccttccctgggagtcagagaggggtaaaattttttctcctagattgccaaaagtagagacaataagagcaataatagctaactagaagcttctgttttagggtgcaacataaaagctccaggaatggctttttctgatatctcattgtcctgaatttactctgaccaccacacctagctgcaaaggaggcgggaaaatgcagtttctctctgagcagccattgccacctgaaggatagagtttctattaccaaaaggaagaaaggaaagacaactctggggaacaggtagcaggttgtgcacgtcattttaaactattgccatgtaggagtcgaaaaggaaccataacatcagaaaatagccatcagcacgaccgtttctgttgagtgtgcaaggcataaggccatgtactctacagcctgcaacaaaaggtaaggcattttctcattttttgcattaaaattgtttataatcatttactattttataacaaatatttataataatgtttcatttattttctcatcaaaagagagagcaatacaagctgtatgagttttgttcaaaaagtagtagagaatttaagagcaaggagaaggaaaggagatgaaataagctttgagtcagcagactcatggaaagatagcaaaagcaagaaagatcatccaaatcagagttagctgttgtgatgggctgtttcctcagtcatctgtgagccctgtcagtggaggttgtgttttatttatctttgtgtgctgagcgcccagtagggctcatttcctggcatttgattatgctaaagtgagggaaagaacactttattggcctttaaataatgaatagaatgcactaagggctatcacagaagagccatttgaccttgacctcacaatcacagggtctcaaattttaactttcaagacacttatatgacatatatagatgacacgcatagttgaaagatgatgatattcatcatataactttgatttcctgtgttattaccaggccacaccacatgttatacacaataaattggtttttataaaccctataaatatcttgtgcccaacaccattatcctgagttgaacagtttgtctttaggttaaaaagaatttgtttgggtcaggtgcagtggctcacacctgttatctcaacacattgggtggatcacttgagatcaggagtccaagaccagcctggccaacatggtgaaaccccatatctactaaaactaccaaaaattacccaggcatggtggtgggcacctgtaattcctgttactcagaaggctgaagcaggagaattgtttgaacccaggaggcagaggttgcagtgagctgagatcgtgccactgcactccagcctgggtgacagacagagactccatatcaaaaatagtaataatgtgtttgttaaaagtaaactcagatagtccagaatgcttgaaaggttattttggcttttttttttcttcatcttttttaaaattgggcttttgtttatttctttatacctaggatctcagaaaaacttgaagtatcccaggcttttctcaagctctttaactattctaaggtcattcacttcctctatactccttttttttttttttcttcagacagagtttcattcttgctgcccaggctggagtgcaatggcgctatctcggctcactgcaatctccgcctcctgggttcaagcgattctccttcctcagcctcccgagtagctgggattacaggcatgtgccatcatgccctgctaattttttttgtattttagtagagatggggtttcaccatgttggccaggctggtctcaaactcctgacctcaggtgatccacctgcctcagcctcccaaagtgctgggattacaggcgtgagccactgcaccaggccacatcatctatactcttaaatgcaagtgccctgaaagccctctcttcatttgtcccatttagatttgtgaactgggcttccctccctttcccaggtgaagtcactaggttcaggcaattccctggccctttccatccttcataattgctactcttaggctcagtactctcactgggcctcaagatagtcaggctgggaccctagcttctggctcaaaagcaggtaaaccaggaaataaagaaagtttagatggacacagtccccagtttcctccctcccccaggagtgcctatgtggacattacagtgtttgggagcacctacaacactccccattcaaacttgataaatacacacttaactagatccaaatcccaaatcttatacaaagaacttaaatgcaagcaatctctaaatgaatttactaaaaacatgtgattttttgtttcatcctaacccccagggttcattcctaattagaaaggtctataaaaacaatacaatgacagatgggcacggtggctcacacttgtaatcccagcactttgggaggccgaggcgggtggatcacgaagtcaagagatcgagaccatcctggccaacatggtgaaaccctgtctctactaaaaataaaaaaattagttgggcatggtggcgtgtgcctgtagtcccagctactcacgaggctgaggcaggagaatcacttgaacccaggaggcggaggttgcagagagctgagatcacgccactgcactccagcctgggcgacagagtgagactctgtctcaaaaaaagaaaaaaaaaaagaaaaaacacaatggcaaaaacaataatccttcttcaagcctaagtttcacacatatcagcaatattggcataagaagcagattttgtaaaactgcaattcagttttacaaaatctaggctctctcacctttcccaactatgcttttcctctccatgacaatgtctacgtctgtgacttccgtgaacaactgctgagatgcagggttgacttccagatcttcaattccagcctcaacctctctcctgggcctgcaagtcatatgccactgcctgtgaggagctgacacttgggtatctcaaacttgggcacttcaacctcagcgcattcaaacctatgctcgtcaactcactccagacctgctcttccttcaagttctcctggtcagttagagacattaccacctttcttggtgctccagctaaacatcagggcatcaccaaccccatatctgatccccctccaaatctcattgattctgtctcctgtgttctcaaatccacacactgatattacctcatccagccaactctgattcctcttctgcacaataactttctaactggcccctctgcatccattcttgtccctgaattacccattcttccctctgcagccaaaagtacttaaatatcctttcccttattcattcgacaaatatttatgaagtatctatcacaagttagggcaccatgccaagtacagtatatagtggtgagcaaaagagctgtagctcccatcttcatggagtagacatgaatctgattgtcatctctgtgcttagtatctgcggcttgcagaagacagcccccaaagatgtccacgtcctcatggaacgggggcacaagctaaaacatgcaagcagccagcaaaagctggaaaagacaagaaaaagtatcctcctgtagagcttcctgaaagaacacagcactgccaacaccttgatcctagcccagtgagacccagtttggacttagactctctagaactatgctgttttaagccacaaagtatatgataattaggacaaccatagaaaactaatatgttggtttactaatattcatagtatcaaaacagcacagtatccttcaatagcttcccagtgcctttgggataaagcagaatccttagcaaggatggcaaggctcttgtgaactgccctgccagccacagcctcacctggccactctcatttcctctgtccactgccagaaagctaaactgcttccagctctcaaaggagctcttctttctgagcctggaacaaactcttcccacttcctggaacaccccctcccttcctccctgctttatctgctgcacacctactcccaacttcaaccttcaagttaaagaccctcagcctgttcatgttagaggtgcccatgctccctttacttacctgttcacacctgtctctgtatgttttaatgtctctaatccccacttaattaaaaactagagggcagagtctaggattctcttattcaccatcgtgaatgcctacgatggtgggcactcaacacaaattttcaaaatgtatgaatgcaccaataagggacaaaaggtaagtttctctttcatctaaagcatagttcccattgtgtacatctggccacttgtcatactcaaacagctgctttatcatccaaaatcgttttgacatcttaaattttgattgctttacctaaacacacacacacacacacacacacacacacacacacacacacacacacacaaaaccctccactgttatgcatcttattttttacacattgcacttttaagtttttatctggtgacattttctcaccttctagcatcacctgcaaggtgcagctacacttcctgggtccctgtattcattcattccaagcagatcaccaatcatcaaacacaatatgaccagtcatgggcaatatctaaaatagccattagccagtggcccctcagaatcactttacccctctaggaagatggcgcttccaacctcccatggccaagcgttcacatggaacgtctgctgtggtggaaaaaagtgcatacaaggaagtggactcctcccattgtgtccactcagcacctcctccagtagggacctcatctcctttctgaggactcttctcccttcccccactacacctgtgaatacaaggtgaggcacctttgtggccacatttcaggccaactacaacagctccctggaaaatttaaaactgagaaagagatgctgctctctcccatttccaacagtttgcaccaaagaagctaaaagaagaagctaaagtccaggaggaagcgagagagggaggaataaaccaaggcagagaaggagaggattatttctgaggttcattcctcagattgggagtgacccaatctcacccttgggttccatgaggcagcccaacatccatttagcacattctcctttttgccttagctttttaagttgtgttttcatcacttacaactaacatgttgtaaacctttgtaaaccctcataaaccacagcaaaaagtgagtccatctatggctgtacagaagctcgcttcatatgcaaagtgaaccatgtgccaggtagcagcatactctctctcagagaatgcaagatcatcattcatccatcttactgtaggaagtgcagaccttactacaagagactctggccccacttggtgttcccagttcttgacaccacagcgagaaagaatccagggatgagtcagaatgaatgaaaggcaagaagcttttattgcaaagcgaaagtacacactcaacagtgggcgcgcaagcgttctcaggagactgagtcacgcacaacacaggtggggtttcacatttctaattttacgagctcttctaattagaggtggaatattcacgacattttctaggaaaagggtggggactttttagaattgaggtcccaccctttttttgtttgtttgtttgtttggagtgcagtggtgccatctcggctcacagcaacctctgcctccaggattcaagtgattcttctacctcagcctccggagtagctgggattagaggtgcatgccaccacgcctggctaatttttaatttttgtattttcagtagagacagggtttcatcaggttggccaggctggtctcgaactcctgacctcaggtgatccgccctcctcagcctcccacagtgctgggattacaggagtgagccaccgtgccctgtcaccacccatttttatactaaatatgggcatgctcagcccttggtcatgttcactagtgggtgtgtgatttagtgtggtaatgagcatataattaggtatgaggtagggcatacgggcaaatccaatgccatgttggatctagccaggttcaaccagcttagccctcaccctgcttgtgagggtcttatcagcccaagctcatccttgtccttgtagctaattctaacagctcctttcttgctgctgtgtgaaattgctgcttgatattttcccacttctctggtgaccacccagcattcttattttatgggtgtttctttaattaggaaatggaataatcattagatattctggaaaaagagggaatttcagggacccctgtttaccaatccctttctcccttatttggatttgcctggaagagacacggacctgtcaccctgaccagggttttggccattttctctcccttattttgggttttctgttatcctgcagcttctttggctattagaaatgtgtttcaacagtctaaactagaactaagtataacgtgataatgccccaaaagtagagtgttggggacggagaagaccgatgcaaataatgatgataactttaatgataaattagtggtgcatatgtgtaacagacacatctaaactgagttaatgtggagacaaggtagagagatgttgcctccagtcttgaagcccatccagccagtttctgttgcaaaaaaagtcctcagtcaagttaaatgaaggaatgaaaatgagatgagaagagagatggcagcaccaattctcctccttcttctcttccagtcttaacattctgcaccccattccttgttatttattttcaaggaaaacttgaattttgaatagccaagttttctttgcttaccatgcacattaaggtatgactctgggcagcccaggacaatagctccgaatcctgtgctttccagtgccttagagaaacacacactggacctccatggatacaatgggaaaacagcaggattgagagcaggtccagactgccatagtctcaaggctctgcttctaagatctgcagaatcacacagggaaacgctatgggactctaaggcttcatgatactcctgactgggaagccaaactctcctcctgatcagactcaggtcacctcctgtagccactctcagcattccagtacaattcccactacagaagcacacctcactagagcaacagagaacttagcccttcccagaacacaagaatctgaggacaagttcactcctcagatgtgttgatctaaggcaaaacattgtctgtgcgccccccaatgcacactcctcaccaccatctcattttttattttggtgtgtctcaaagaaaaatttaacctcaatggcacctgtgaagaagaagaaaagtcacaagtggaaggagtggaagtaggaaaaaaatggaatagaaatggtagctcaaagacgcatgaatgagccctaaattaattttcacattagctggagcaccacgcatttatagagttacaacccatccaccagcagcaacacggggctccactgcctccccagggtaatatcatctatttaccatgacaaaaagatctgtctcaaacaaggagctagtttggatgttagtcacttccaaatatcagtttgatagcattataatggactaagtgttgatttcagctcattggtaaaccgaacacttcatagagtcatttgaaacagaaaaattaagcaggtaaatgttgggataaaaaaaaaattaacaaatcttcaaataggaaatgcatttattaaattaattgcgtaggaaaatgacagaaaaggtaggaagagagaaaggacatttccctagacacaaaatgtcttagaggcctggagcaggacactcgagcctaaaataactctcgattccttaggttccatgtcttttagcagaagctaacttttctggctcagagtgtataactgaactccagtgtgaaatattgaaagaaaatgactacagaggacctatttagacattcctggcaagagccaggttagaggagaggagggaaagggctgtttatcttgacagaggatttccttaccagaacatggaaaacattctttttgtcaaatatggttaatagtcacccagtaacacaaagagcagtttcagtagcttaacatcaacatggggtgactgggaaagctgaccgtgccccagcagatggaacatgtgctaactcacagccatgtcttggatggggacagtgttgttgatgagtgcataggaaaaatatcattagctagtacactttccaccaaggaaaatgttgtcacctacttactaggtaatgtagacatgcccaaccaaaaatgaggcaagcagcaatattaacacatcctcaaaatgccttgaaagacccggctgccttttcaaataggaagaacagaggatgccctcacacatacaacttccccattctgatgggaatgactgactttttgtagcattgcaaccaactccctcgctaagctctgtgggtatttcccctggaggttgaggcctctgaacagaacatctgtgatgagaacagtatggagtaatggaaacatcttggattttagacttggttatgtagcttctagccctgagtctgccactgactgggttttctgaaacaattcagagtctctctgggccacagtttcctgaaaaccttctcaattccaatatgtaaaaagacagtcacagagatagaaaccctcttaaaggttatgtatattagagataaagccctgagctaaccttctagtttcaagtcaaatatcaatattaaggtttggttttgttttcaaagacatccaacatttttgtttcattcttcaggtttcagaattagctcaaggaacttttatatgtggttcatcgtatttgctctttcctccatccacacctcttaaggcacagttttctgtatcttctctctacatgaccccaaattaaataaataaataaatatgaattttgttctcaaattctttgacattctaattatctaaaatgctcttcttttatacctgaggttttttttaaaaaaaagggtcattactacttcttacttgagaattatgcaaatttggggagagattttatatttttttctgcaaataagaataagaatattgtgatgtgtgtggtgtgcttatttccctgagaatctgagcaattatgagttcattttgagttttttcattcaaataacaaaagctggaagcagtaaactctaaaaccagaaaagtacttgggaatatcatgagcttgtgtttggtttagtagactgcaatatggtcaatatactttgtatctgttcccatcaagagactgagtctatttccctgtctctttaatctagccgtgtgtcttgctctcgcaaataaaaggcagcagaagtgctatttggccacttctcatgggaacttctcagctttgtcctctagaggtcttgtagatactgtctgatgctttaacaatcctgccaccacctgaacaagcccctaatagcttactgaaagatgagagacctttggcagtcactccctcacctcagcctctaaccaaccaactaccaatcgagtgaatgaagctactgggactggccagcacaagctgacccacaaaatgaccacacactcacaagcaagcccagccaacatcagctgagctcaaatcagaccaaaagaaccacctagcagaatcataagctaaccaaatggttgttgtttgaagccatttgattttgggattgtttcttatgcagcaaatactaactgatacacccagtttgtttttaacaaaggctaatctaagcatcattctgcattatgttttatttatttatttatttagagatagggtctcgctatctgggcaatagcccagcgtggtcttgaaatgctgatctcaagccagcctcctacctcaacctcctgaagtataagattacagacaagtcaccacgcccagcctgcattatgttttagataatataaagtaagtagtatgttctcagtaacccccttttatcttgccttttctttgccctcagcacacagcactctctccagatactgccatattctgccatcctcagtattcctgtcccaagagaaactatttaataaaatcgatttgagcaaatacatgaacagatagagtattttcagatgcattatctcattatatttcattttattttcacaacaacccatgaagtgataaacatcattcccattttacagataaggaaaccgcagctcagaaaggaaaaagcttgtccatggccactaaactagtaagcagtctctcacctccaaaccttatagttccctacccatcacacttccacctcaagtttctctccatctaagatactggcatttcaaaagaaaagaatttgcattcctggaggagaggctccttgccaccaaccctattgaaaattcatacattaatagtagattacagaaaacattttggagaggtcattcctgatgttcctcaaattacaatttatattcctcaaatgtaaaagagtgcaagctcctcctctgtcagagacccaaagaaaggaatccatttaagcagtatgtcctttagttacacactcagaatatgactgtgcaccactgtttgactgaaggataatttaaggacatttctttaaggatgtcattattgcctccatttaatgactgttagcctaagcctgtggttctcaaagtgtggatctaggaccaacagcatcagctccacctggaaacttttgaaactacaagttctaaggccccaccccaggcccactgaatcaaacctctggagatggggttgagctgtgtgttttttaacaagccctccacattactaggaagcatgcttagaagtgaggagtgagaactccatgacaattgctcaatccactgacttcatagagtaggggctggtaaactgcagcccatgggccaagtccagccagccacctgctttttgtaaataaagttttattggcacacagaagtcagtttgcttccataccacaccacaagagcaaagttaagaagttgagactgagaccatatggtccacaaaagcaaaaatagttacaatctggccctttacagaaagagtttatcaactgctgtcctgggggttgactacattcaggtgcaatggataagaacataggttttatattcagacaatataaggtttaataccaatcttcacaatttactaagtggcctaccatgagaagtttcttaattgctctaagtaggactgcatttcttcctcctctatacactggagacagtcaacttgtaaggttgttgaaaagatgagatgagattgtgtgtatgaagtgctgaacaaagaacatactgcagattcaatgagtggctttgcactcatctctgtaaataaacacagtatctatctccttaaggcatcatgtgaacaaccggaaagctgtgcatttggagtggatgctgggatgcacccacctcagatccccttcaataaaggactagtagccccagctgcagtcagtgtccacagaagccttcagttcccagggcctgcaggagtggcctcagaggcctcagtcatgcccttcctgattgattgggaaggagtataaaagcctggccatcttagctccagtcagaactctgaggttcatttgagctccagagtcccctgtggggctgactgaggctgcaactcaacttctttcctgcccactcctgcccccatccaacaggtgttgcttccagcccgaggactctccccagtgaacgtgctgcatgccaaggtctgccctcttagtgagcccaaccatgacatctcaagacttggagaaaatgtctagaactgtctgacataaaatgccatgatattcccatggcaataagcctcgaagataaaggtctaggaaagtggggagaggtttttgagaatttccactggagggtgctgtctttggtggacaaagttatatttccatggtggtagtagttgcaataagaaaaacctgagttctctggtgcaccgattacggagatgtttaaactcatctttatagctcagtgccctgggcagctacccagctggcccatcccataacccatctctgattccaaaagctccttcaagtcttggtagataggaaacagggcatcaaaatgacacctaagtccagcccaaggaaaacactaggttgttgcagaggagaagcagcaaccagggtagatgctgagtaaagaccttctgatgtgtaaccaggcttatccccagaaagggggttaagtgtgatggtgataaccccactagtgtggggttatcagcatcacactagtgcccacctgggtggactttcggtagacaatctccattttaaaaaagaagaaaaagaaggagaagaagaggaaaaaggaagaggagtaccagaaggagaaggaaaagaagaagaaatggagataaggaagaaaaaaagaaggaaaagaggaaggaactaggaagggaaggtggggaaaaggaagaaaggggaaagatagggaaggagggagagaagacgtgagggaatggggagagaggaaaaaaagtagagcttctattcataatggtcaaactatcaaaatgcccatcaacaacagaatgtaaacttcatcaagctgtacacttaggatatatccatggccacttttctgtattgtgttatatatcaactgaaactgctaaaaggaagagttctcactggctccgtatgccccaaaaacagcaagtaaaagctgaggcttatggaaattaatcctgaaattagacctccaggataattcatggggtaaaaaaaacagaaaaatgcttcaaaaacacctaattgaagcctggtgactttgtctacaaagaaacacactattttcatcactagaagtaagcttttattccagattctttcaatatgcacatttgcaaaactgtggcttatttctccaaaggccttactaaatgccccactgtttactaaagagccagtcttgaagagcaagggaaagtttacaagctgctaatgagggcttagcaccctgggaaggacaaatagctctactcagcagctccacagagggaaatgagcccctgtgcctgacaggtgccagccaggaagcgcagtcctgcattgattgctaggtagctagagcagaaggaggtctgggtgaattatcatttcattgactcggtgcaaaaggtatactgagcttaggtcactgggttctccacaagccaaggcagataacaagaaaacaacacaccatagtaatagcttgattataactgctctatgccacttttccttttgacttaagggaaattgtctttgcagggaaattaaggggaagggacacaaggaagactgagtcccatttatttgcttgtttcacacattcagccaacaaaatttttatcaagtaccaactttgcaccagacactcctataaatgctgcatttgcaacattgaacaagatcttcaaagtcctttcccacgtggagttgatattctggtgggtgaaaccaaaacacaaataatcaaataaatacctagtataacatcaggtgggaataagagatagatctggttgggagctgttgctttacaaaagggcatctcataaatctctctcgaaggagggggcatttgctatataggccagagtaatacatccctattttttcttacattattgaaaattattggaaggctataagcaatggaatgatatcatctgattatgcttgttaagactcactctggctgcctgtagatgcattttaggacaagagtagaagcctagagctatgggaaaaagagatggtagagatcagagaagtatatacagatttgcaatgttttggaggctgaagcaaaaggatcactaacagcttgagtagaggttttgagggagagaaggaaatcaaggagaacagccactttttggcttgagctgaagtggttagcggtaccatttactagaacattcctgcctcttgatccccatgataaaaagaacttttcatctatggaatgtctctgtcactattgtctagagaagatagaactggcttggacatattcctaagaagcaagaaatggcagcctcgttatttttcagcccttgtaggctgtaactttgggagcacacaattcataaataaattccaagtaccttatttatctctttttttccacttgattgaaatcctgggcattgacttctactaggatgatgaatttggctagaactttgtcacattcattcaagactaatatggtgttatctagtacaagaaacagatgagaaatcattcctgtaggactgaagctcagacacggcgcaaaggaaacacatgagacataaggaaatcattggaacacagacattagacagtcttgtgctgaattagacaatgtcttagttcacccaaaatgtagtatttataggcatggcaaggaattgggaattaacttgggcccacagtggttgtgtttcaaaggtgaattttcttagcactattcaagagcattgaactttgcataagcaactaatcaacctaggaaaagcatccagccaacaagtattttttgagacatttttgtcttccaagtaccaagaagagtacagtagggatccaaataaaccagctcagctccttgatgaaccaggggtctaaagggaaagttagcactggcaaggtgattctaaatcatgaaatacttgcaaggagaagtacagaatgctatgggagcacataccgggagaccaacccggtgcagggagtcgtgctgagataggacaggtgtcaacaaggcaaagagaaagcagacacctcaaacagagccaacagtcaggaagcggaaaagagtgtggcgaggaactctgaggagtggggcatagttatctagaggagagggcttagaagagaagggtggacaaagaggcaggagaggccggcaagggccggatcaggcgactaaggcctgataaaccacacctgttgtttattctaaaggcagtgagaagccactaagtggccataagtagaggaatcaagggctgggtttttaaagatcactctggcagcaggataggaagggatggcctaggacaagtgtgttcatggcaagagagggaggaggcttgatgaggcaggggcaggggtggggaactgcaagagttgcttaggcagtagcatgatggataggcgtgtgccatgcacagagtggggcagaggtgggagctgcggcaggcaaggaggcagcagggtcaccaggattcccgggtttcaagccagagcattttactaacatggaaaactccagaagtttgcatgagtctgtccattcagttccagtttccaccctaggtaataagaatgcagtctagaagaaaatgtagaatgaaagtcaaaggaaccaaaggaacagagagaggatccaagagcctaacagaaacagaaagtaagagagaagggaaaacacgtaaccaaaaacatatataatgaagcccccgccgccaacacccccgccacctgacaaaaggagaggaattaacagcatataggactcagcagggttgagagaagcaagtgtagcaactgcctggcctgtgatttctggatggctagaaggtacacagttattctagcttggggcccacagagataaggcaaaggccagtagagaaaaaaagataccagctgtgtggagatggaaaggaatcttccaccccacggagtgaagtcttaaaccatgcatgagaaggctggatatagaagctggaacaccacatttgtaccctcttttgcccattcttggatagaaatgaaaatatcagtgattggccctgaaatgcaaaggttttgtaaaaaggatggtgtccagggactctcagtgcacagttaaaggcttcttgtttaatggctgacatgtaagatgtctaatattttccgctcacttaacctcttattctgagaatggaccgattgtccaagattgcagacatgctcaggagtgctggcaaagggctaaaatgtcttctgtaagactccatggaactatttcccaggagaattcatgaaaaatgttacagatgatgtgttacacctcgaatgaatctctttgtcccacaagtgtgtttctccactgctttggagaatctcccagatagagagaaaatgggaattaatttattccaagagaccctattgtttaatgacacatacagtaagagatccagaatcacaatcacccaaaccacgcaagcaatggcaagtgctctaaagaaagatggggacatccaaatggtaggtaaagcttttcagcaaagacactggagaagggaatccaatgaactaaaactctgcaatgttaactgagggtttccccttgcatttccgagaacgatggaaattctccctgccttccccaactcagagtcagtaatatgcagtcattgagtcagggaaggtacattacagtaggaaaatgagaaaaaaaaagacttgaatgaaactttgaatatggctttccttgttcagaatcacagtcttcatctttccagagactaagattttaagcttgaatcgcccacgttctaaatccttcaggaaataaagcccagtttgtttatttctcagggtcccaggcagagaaatcaagtgaatcctgcttctcagttcttagctgtttattgctagcatcagcctgtgcaaaactcctctctggttttattttttcccctttgatctgtaatccccactccattccctagagccctgcaggtaacccactctggagggtctgtttatccctaaatatgcatatgtccttgtaaaatatccagagccattatgtgtatgtttaactaattaatcataaattattaataataatctatccacattgccatgtttacatctatattgtggctgctctctgcaaccatacacacacaaaaataaaccctcagggcatcagatttatacaacaaacaagattggggataaaaatgaattatgagctatgagccagattgtcttgtcccagataggacatcccttctgtgtgctgccagtgccgttctctgttctgggagaagggaacacaagaatccaaggggaagaaaacagttaagacatcaatgagagtcctgagagagaagatccttgccctgtctccaagaccaagaccgggggttcacaagagaattccaggtaggtccagagaatgagaggtccttttccatgtatgaagtttgtgaacaaggagcaagacctcaaagttttctcatgcctcactcagtatagcaatgggaggaatgtctgcatgtgatgccttgggccccctgagccccaatgtccatgcaggatgcagcctgctgcgactttgccttcactgggtcagccttgcaggttgggtggggcaggcagatgtagcatcaaacacctgacaatgaccctggcccagcagcttcgtgcctatggtgtcttggctctctgtagcccccaggatgaggatgaagccacagggaaaaagggaaagaccatgaattcacagaaatttagtttctaacatccaccagaatggagagtcagtaaaaattaggtcataatagaaatatgaaaagattacattttgtgcacaactgatttgttttgtacctactacacacctccctccttccccagggtcatggggctttttgttttaattagaaaattaaaaaatattctaaatctggaatagtgcaggtcctagaaattctggatacgtgatcttctgtatacaataaaatgtaagtttaaaggaagtaattctcttcctcaaaaaactaaagacagaactaccatttcatccagcaaccgcaccactgggtgtttatccaaaagacaggagatcagtatatcagagatacttgcacccccatgtttattgtagtactatttacaataaccaaaatatggaataaacttaaatgttcgtcgacagattaatggataagtgtggtatacacacaatggaatattattcccccataaaaaagaatgaaattctgtcatttgcagcaacatagatggaactggaggtcattatattaagtgaagcaagccaggcacaaaagacaaatgtcacatgttctcactcacggaattcacaaaggtagagagtacaatggtggtaaccagaggctgggaagggaagaggggaaagggagatgaagagaaggtggttaaagggcacaaaaactcagaagaaataacttctagtatttggaagtaccgtaggaaaattatagttaataatttattgaatgtttcaaaatagaagagaagaattataatgttcccaaaacaaagaaaagataaatgtttgaggcgatggatgtcccagttaccctgatttggtcattacacgttgtatacaggtatcaaaatattacatgtaccccaaaatttatacaacgcttatatatcaataaattaaattaagttaaataaacaggaagcaccaggaggaactcctgatgcattttatgcttaaaacaaaaaatcctaggtctttccatagataaatctaagaatgatgataaatatggtggaaacagggtctcttggtgctccaaatatcgtttcccaaaacaaaggaacaggacatcccagagtaatggctgactccgggcctgaaacagggtatgtagaagagggcccttcaatgcaccgtcacactggaaagcaaggaagccatcaaagacagccagagtgcttcaaaggactcagaaatcaacttatgaggccccactggtcaaggatggcacaaggtgagcatgagtaaggacactaactgtaacagatggaaacataccaaatagatttcatccaaaatttcataagaacactgtaaaatcactgactgcctttggagaagactagtaaaccaatttgttattttgagaactgatgagtaaagagagtgtcaagcacataccctgcctttcctacacaaagagaaaaaccagacattacgtcccccacagaagaaccaaccccacctgtaaaataaccttgctgaaaagtgtgaaccttagtccatttaagcatttggatctaataccagctcataggaaatccaggtaacagaagaacatgttaaatgacaccacaggtgtctacatctggggaagcatcagcaaaatacaaactagggggaggcctgaaggttaaaaggtaaagagcaagggaaaatatagattaaaaaagacataagaggcatgttagcaaatcacactatatgggtcttagttgatactttttcaaataaataaaaggttaaaaattacagtacaatcaaggaaatgtaaacactcgctggatacttagtgatgttgagggaatattaaagtgagataatattgtgtttttatttaaaatggggagcctatgtctttagaaatatgtttagataaaataatatgatgcttgggatttgcctcaaaataacctggaggggaggtgctatgtgttgcttctgtgttgctgctcaaatctcatgtcaaattgtaacccccagtgttggaaatggggcccggtgggaggagattggatcatggggacagattttccccttggtactgtccttgagatagtgagttctcatgagatctggttatttaaaagtgtgtggtacctgccccacttcccttcttccttctgctctggccatgtgagatatctcactccccctttgccttctgccacgattggaagcttccagaggcccctccagaagcagaagttgctatgcttcctgtacaacctgcagaaccgtgagtcaattaaacttcttgtgtttataaattacccagtctcaggagtactacctgagacctgtataaattacctaatacaggaggtactggaggtacagagaatatgagattgtccacaagttgattgttgttaaagcaaattgttggaaacatgggagttcattatactctactgttgcacataagtatttgaattttcccataataaaaagtttgtgcaaaaaaagattttttagtatgggaagtcgtttttcaagttacaagataatcactctcgataatcactcttaatctcctgagtgaagaagctatattagttagggttctccaaagaaagagaagcagtagaaatatgagttatacaagagggatttattataggaatcagctcatgtgattatggagaccaagaagtccaccacctgctgtctgcaagctggccactcaggaaatccagtggtacaaatcaatctgaatccaaagcctgagaatcaggagtcctgatgtccaaaggcaggagaagattggatgttccagctcaaaaagaaagagtgaattcacccttcctctaccttttcataatatttgagccctcaacaggttgataatccccacctgtatcaatgacaacaatcttctttaccctgtctactaattcaaatactgatctcttccagaacaccctcatagatacactcggaaataattttttatcagctatctgggtatcccttaacccagtcaagttgacatataaaattaaccatcacagaagcctaatgaaaacacgacggagacacatccttggttgttctgtgtgttctataaccaaggctgtttggggggtctgaggcaggaaccccacttcaaagctttgctgtcagaacttcaagagccagacacatccaaaagtcagctctgactaccaaccatcttccatgacagccagggtcagattcagcaaggatgacagtccagggaggttgttccttatagtaacaatttttttttgttaagaaactacaatatatatagtctgctcattcatatatataaatattatttatcaaaatagtaatattttattaagttttaaaaattaaaactctgatctctgaatgaaatgtaaattcctaggtctaatacataaggactgcagaataaagtatagtggaacttcttttttaatccaaaagaaaactattaagaagtaaatatcaactaaaaggagaaaagaataagtcctaagttaatggatagaatttatattttcttcaaccatataatcagggtataaaaagattgatgagcagcttaacgtctattgagaagaaaaataattggaaagttcttgagttatacatatgtttgctcttccattctcaactttcactggctttttaccaaattccagtgaaccataccttggtagcatctccttaaattagtgaaaagaaatataagacagactatttgaaaattaaaataaataagagcaaagtctctcctatgcatttggtgagtaggtttacggaattcagtattcccaggaggaaggagagctgtgaggccattagcagatgacagaatcataaagaattattgagaaagattttggctgggccagtctttgtcctgagtttgatatcatagcctccaagaaaaatgaccttagacttcacccacagtaacaacctgactatgacttcttctgagagagttggttctaaagaaagatcaagtgctaaataaagatctcattatagatcgttatagatcattccatcacagttagagtcaccttccatccatcctgtcagaaaagatatttctggagcatcacagatcacattaacatggccagataagaatacgatcccaagagattcctcctaaccactcccaccaataaccagtctaatatgctttccctaaagggtcttccaaccaggaggtcacatgctccagaagcagcccatcctgcccattgcagcttctgcagctccctgtttctgttctatttccaatcattgcactggacacatgagcccttctgtagaccatcagagagagctcctcaaccccttctcccaggtgtcatttacatcaggcaagaaggcatggcaaatgggtcattcacatctaagtccgcaacaaaaagcaggggttgtcaatggcatttgtacatagaaagtccccagtattcgacttgctttttcaataactattacccaaatatgtactcaaaccgtgggacactggctgatgtcaaaattctttctgaatgactatgaagtctgcccatatagtttatacccatataatagtgaaggctgactctccacattttctgtgaaattaacaactttgagaacttgcaatctaccagcattcccagcagctaactgtaggtaatagataggatgtcttacttatttagtagtctttattctagccaccaaacctcttttaaaaaaagaaatgcttctaaaactaatatttacttgttcctccagaaatactttaattggctttgtgaaatcaatggttcccttgataattgataaaagagtgtctcttttccctgtcctggcaatatcttgctttaaataacaggacagatcattctttcacaaatatgaaaaacagattttcggaaacaagcttattttattaagccatgttatttaattttacctgacatttgcaagtcatttttgctagtaagcactctacattaataccttgagttcacatagagtttaacaatatgaatttcctatcagagaaaagtacaatatatgtttggcagaagccaaagtcatgaagaattaacagttatcaaatcccaaaggggaaacaaattctctttgctcctctcttgccagctgtcatgaatccaatttgcactttcaaaattctgcctgttacccagattcgggaatgagaggactagtaacttagcatactcgtgcccaaccataccaaatccaaacatttacacacaacccaattgtcaacaaggtagaaaaagggtatcagcttaaatgattgttatatcaaacatacctagaatgtaccacagagtaagttattttcatatgcttaagtagatgtgacaaataccaatctcaaattataaattaaatggattcctgaaaaattgtactacatgaaaatctactttcccattgacattattttattttattttattttgagatgaggtctcattctgtcacccaagctggagtgcagtggcatgatctcggctcactgcaacctccaactctcaggctcaagcaatcctcccatctcagcctcccgagtagctgggaacataggcatgtgccaccacacacagctaatttttgttttttgttttgtcgtggtggtggttgtggtggtggtggtggtcgttgttgttgttgttgtgattagagtcagggtttcgccatgttaccgaggctggtctggaactccggagctcaagcgatccacccgcctcggcctcccaaagtgctaggattacaggcatgaggcaccccacctggcccgttgacatatatttttaaatacataaaacaagattcaaagttttaaaatgcaggaatcgagcagtaatacaaacagcaaatatcaaacaatcatagagtttaaggaagagtgttctttcttataagcataactcatgtgaaaatacactttgtgtgggccttcaaatctccacaacttttctgggccttcagaaacactgtttcatctgcatagagccatgtccacctgggaaattcctactcaaccataaaggcacaatccaaatatcactgcctctacagatccaggttttcctgccctgtgatcccttaagaaaaaaatgtcaacacctttccatgaaccccaaggcagaatgagggctttcctttctctcctggcccctgagaattcctccttggtagccctgagcacaagcacaggttgttgtcatcattgttgaacgctgttatctttcaggaccatggaccatgtatacccttcgggaggagatatataatgcactttggggctcagtgcctacatccgtgcctggcatctcactggtgctaagaaaacacttataaaatgagtgaccaaagaaaatgaagaaattaaatgttaaatggtatcttgaattcttaaaagcttatcatagataccccataaattggcctcaatggccaattcagaaacatttccagttagcaggttccttagatctcctagcatcaatacaggggtgtatttttagtttggttgctcttagtaaaccctgagctctctgatttcagaaaggatccacagaccttcaagaccctgaggtgctcatcagtttacatcagggtgactcaacaagaagctagagcccagggacaccccacttaagaatatcttaattggcaggctttttaaactgctctcagctgattaatgagtactaccagagggattatgtaatttacagagcaggaacagctctggaactgaaggttgccaattaaaggtatgtgcaacatcccaacagcaaattcagccaggcatgttggctcatgcctgtaatcccagcactttgggaagcccaggctgaaggattgcttcagcccaggagttcaagaccagcctgtataacacaggcaaaccccccatctctacaaaaaatatttaaaaaacacaagccaggcacggtggcacgtgcctgtagtgccagctacttgggagaatctcttgagccaaagaggtcaaggctgcagtgagctgtgattgtgccaatgcactccaacagcaaattctaaagaaatgcaaagaagactgcatatcaagggccaacacatcctcccaagcaggccatgtggtgcccatgtcacatgctcatgctggtaggagctctcccgtgcagtctttagagagctgtttagacagacggcagagcatgcaccagctttagagtctccctgataaagagcttagggctaatgtctacaggactgacatagttcttaagctccacaactctcaagaaacacaagaaacctaaggatatcaaagggctgatgggtgttgcaaggcaaagcagtgagtcagaggtggtgggcaaaaccagccaaaggaaaatgacccacaatgcttttctgtaggcttatttaatgaaaaattaaaatccactttaagctacactgagtattgatggaattgcaaccaacatgacagtagaggttcaatgttttcaataggtgaagacaagataaggccatactggaaataaattaccagtaggcctcacaagggggtgggaaattggaaaattctctaatgaatattagatggcagacagagaaggtatttttccttttgcatattttagtttgcaaattatgaacctaaacgcttgataacctagagtccatattctgcctgtcaaccttcagcctacaaaagggcttttatattatccaacattctggaatctgcttaatgcaaccaccatagcttgtagcggatgaagtaacagattggcttgaactgaagcaacctcaggaaggtataatgtaagacaggcacatggggtagtcagctgctaaaagctcttgatgtcagtgggtgcccttgtatatgaaggtttttaagcccttcctggacagtcaagtatgcaactaaagcacaacatttttcttgtaccctttgaataactatgtggcaaaacttgtttacagaatttattccaatatatcttaagaattcctaattcagctgaattaacaatttaactgctctttcttctttctgcttctatagtcatattttgctaccaatctgttttcatttattcaaattgctatacagctctgcagtgttcaccattaccaagaattattgccactttatttatttatttattgagatgaagtcctgctctgtcacccaggctggagtgcagtggcatgatctcgactcactgcaatctccgcccaccgggttcaagcgattttctcttgcctcagcctccccagtagctgggattacagacacacactaccatgcccagctaattcttttgtattttagtagagacggggttttaccatgttggccaggctgatcttcaactcccaacctcaggtgatccacccgcctcagcctcccaaagtgctgggactacaggcatgacccactgcacctagcctattgccactttctaatagcaaggtccagattttgaaaatctgaagtttatggtacctgtggaaacactcagcaaagtaggtaccaaagagatgtttacagctgcttttattaattttctttattctatggtttcagccaatgcacagaactaaaagctgatatataagctactaggttttgaatctgtaatttccaattattgttaacaaactgtcccagagaaaattatgaagacagaggtattagtccgttttcatgttgctagaaagaactgcccaaggctgggtaatttataaaggaaggaggtttaatcaactcacagttcagcatggctagggaggcctcaggaaacttacaatcatggtggaagggaaggggaagcaaggcatcttcttcataatgcagcaggaaggagaagtgccgagcgaaggacgggtggggggtgggggggaagagtccttataaaaccattagatctcgtgagaactcactcattatcctgagaatagcagaggggaaacctccctcatgattcaattacctccacctgggccccccccttgacacgtggggattatggggattaaaaaatgagattttggtggggacaaaaagcctaaccatatcaacagtcttctactttcatacaaaataaacatccatccctgtgtacatatgtttgggattgcagaaagcaaataaatttgagtacaacttaaataacatatttctcatgacaggattcccaaatgtatgtaaaatgtccttaaattgacttcacctttacatatatccttcaaaaacttatttctaatatttcaatcattcctcttaatattttgtttgcttttcacacatgaacacacaattgacaagatttaaagtcatgcatgcctaagggtaactcaccaagaaattttccatttttcctccaattgtatgaattttttaacctacacttcttatcacagttattagcatttgaatattagcatttttcacttatttctataaattaaagccaaaattctagaaataaacaattattcaaacactgcctttcagtgaaaggtagcaaagtggctacagttgaaagttcttgtcaaaggcaacaccgcacacatggctcattcagcagctgacatctgaagtctgccttgaaatcatcaatatctccaagtgtgagtaaatttaaatccagagaccctctgtacttccaggtgatagcaggacagagtgacccaaatcactgggccccttctctcctgtagccacactgggacattctcagttactcacaaagaccatgctgtctcaaattccagctttcacacaagcagcttcctcagcctagaacaaccttttcccacccatcttctccaattttcttctgggacattcctgcttgtcagttctcagcttaaatgtagccttccatgaacctctacatcagactctgcatcctccaacattactctgcacctgaggctcagcaacactcccaggcttgtaatgatgcttggcggctaccttcctgaaatgaccaacagctctacatgcacaatctggaaacccctgtcctctgtccagcccattcccattgccaggcacataacacacacccatctttgaagaaacagattaaatcaagtttaatgaaaagctcagtgaacagaatttttttctgaattattaactttccttttgtcatgcttaaggagaagagagagagagaaagaaagaaagaaagagagagagagagagagagagacatttgtgtctgcatcagggtgaagcaatacaactgggccatggaggttatttacatggcattccagtgggacaagtcttctttcttacagacaggtttccaaggccaaggaaagcaaaccaaggcatgctttggccaaacatctgcgatattttgatcctcatccatttcttcataccaacagagatctggcctctctgtgtagtagcatcaatgttctctaatattctgtgttggccacatgctcccccaaagccaaggaaacaatcctgtcttcagcggggagctggagagttgattcaaatgtaaagcagaaagcccaggttccaaaatgagagccacagtgagtcctgtgattttcagttttgaagaaagggcagtataacaaggattgattctctgcgatcaccaatggcccctgtgttagtctgttatgctgctacaaagaactgcctgagactaggtaaattataaaggaaagaggtttaattgactcacagttcagggagggggctggggagaccgaccgcaggaaacctacaatcatggtggaaggggaagcaaacacatccctcttcatatggcagcaggaaggagacaaatgagagcgaaagagggaaaagccccttataaaaccatcagatctcatgagaactcactatcacaagaacagcatgagggtaactgcccccttgatcccattacctcccaccagggccctcccacaacacatggggattatggaaactacaattcaagatgagacttgggtggagacacctcccaacaatatcagcccccttctcagctcccagatacacaaagcaaacaaccaaaaccacaggtaaggaattccatatgctttatcttaaacaataaagaaaaattttttaatttttatttaaataaatattatatttaattaattatacatataattatttatataattatatttatatttacatatttatatattatatatttatttatatttatatatttataatatatatttatatttatatatttatatataatatatatttatatataatatatatttatatatcgtatatacttatatataatatatatttatatatgtatatatttatatataatatatatttatatatgtatatatttatatataatatatatttatatatgtatatatttatatataatatatatttatatataatatatatttatatttatatatatgttatatatttataatatatatatttatgttatatatttatatatatatttatgttatatatattatatgtatacattataatatattatatgtatacattataatatatgtaaatattatatatattacatgtatatattatatataatatattacatgtagatattatatatattacatgtagatattataatatattacatgtagatattatatattatatattacatgtagatattatatattatatattacatgtagatattatatattatatattacatgtagatattatatattatatatgtagatattatatattatatatttatatgtagatatttatatattatatatatttatatgtagatatttatatattatatatttatatgtagatatttatatattatatatttatatgtatatatttatatgtatatatttatatattatatatatttatatgtatatatttatatattatatacatttatatgtatatatttatatattatatatatttatatgtatatatttatatattatatatatttatatgtatatacttatatattatatatatttatatattatatatttatatataacatatttatataattatatataatacacatttatttatattatatatttatataatatataaattatatttatatatcatgttatatttatcataaataatatttattatttcccaagttagaaataaaaaagagaggagtaataaaagaaatatgaggtccaggcaaggtggctcactcctgtaatcctagcactttggagggtggagttgggaggattgcttgaggccaggagttcaagaccagcctgggaaacaaggcaggaccctgtctctacagaaaactttaaaaattagcctgcatggtaccatgcaactgaagtctcagctacttgagaggctgaggcggggggatcacttgagcccaggggtttgaggctgcagtgagcaatgaccataccactatactccagcccaggagacagagcaagaccctctctaaaaagaaaaaataaagaaagaaatataaacttgcttctaagacaataatattaacaatgagctttttaaacaaatattttttaaaatacatcgttcagcaaattcttttttatcaaaatttttctactgaaagctaacctgatattgttgcagaggttctggagcttggctctttgcctccaattaggggtcattgtaccttagtcaccagtaggtacgggaataccaacaggcctctgcctcaatgcggtaacataaagcaatacagaaacaatttttggctttgctgcaaatgtgcataatggaaagcaaatattattaaaaagagaatcatttttagtgattaaaacaatccaaggcagaaaaaatttctcccataagtttctaagttctcatttatcatcgttttgccgcaagaagccagagtaattttatttttcctgacttctattaaaaagatcaatacatatgattccaaagagtctcggctcatgaaaagatggagcaggcctgtaatcacatatgaaagtattggttgtcattagcagaaagattgatctgaaaagacagccggcccagagtgaaaggacttaaaaatttccatcggactgcccagcaactttcaccttccagatgattaaatacagataacagattaccatattagaggaaagaattggattggggatattcagtggatacccactttagcaaagcaataccaaatttttcaataataattttgtctgatgcaaaaaaaaattaatgctgcctgacagtacaaagttattgttcaaggtacatttaagtcaaagttgttggatgaaattcttatagttacctgtggcttcagaggctctaatgaatgcacatgttcagttgactttttaaaacggagttaaggaacatattcagacaaattccgtgggcttattccatgaacagagcttctttccactgtcttcagtgagttattgacatgacccttgatgatgattgtacaaaactcacaagaactgaactcacagccatgtaaaaggctttcttcactccatagctcttctttccagaaatctacttatggtttagtaaaaatgctagctataaaacaagatggaatttttatggaaccttgaaagggcgtggtaaacgtggaaattcagagttgtggtccaaggacattgtaaactagaggtcagcgtttttaatatcttcatccttgtcccacatatgtgcaatattgacaaacctcaggatgatgttctcatgctccagagttgagagaaaagatgcaggagaggctgagaccaggagcaagagggatgctcttaacaaaatgttggcctgtacattttcaagacatctgaatatttcatcactcttcaatccctttacttacttagctgccagcaaataaatacctgggattctcacagtattcagaactgttcataattatcaaccagtgatcatttgtaatgaactaaaagttggtattggaaaaagatgccaacatccactccctagaacaatattaagagtaagtgtgcattgcatttatattaagtaccattgtttgtaatggacttcaaaagtatttgagatattttatataagtacaatactctatcacgcttctacaaattcctaaatgccttcattatctaagttttacacaaaatcccattgtcatggtatctaccagacacttcactgcatagaaagcaaaactgttttcctccatgtctaaatgaaacaaaacataaacacttgtttttatgaaaataccagaaaatgttcatgcttttggaatttcctgtaataatagtatcaggagtaaattcctctaaatacagaggacaggaataagactagccagaaattatttttagtttcccaaacttagtaaattcttgcccattttaagctgaaaggattattttcttttcttgcaactaagaaaacttctccattttactaattcagtcaatatttttaagatagcgagaaatgtaattttttccatgctttgtgtaagattctgtgtaagtataaatgtgcatggtcatattccaggctggtaatgaagacacatctttttaaagccaattatctttttaggactatcaagataataatcactgaaggggattactgccttaaaagtggagcatgatggctctccaagactagagagggctatagtaactgcccatcctggacctaatgaagggttctcagaaggtgactcttcagtcatcagacaccacaatggacagacagtctgtgatgtagctgtaagtgctcagtgacaagagcatctgttgccagctccctgtccctcctctgccctgctctgtcttgtgtatgtcttgagggaaggtctacgatatgacatcctgggttgacaatgcatcccaaggaagatggcatagcttgtacaatgttccaagacacggggctctgatttgcactgggctgggttgatggcaaggtgtataagttatatcacattcctgtcctctgtgcagagtctgacaaataaaaagtggctgaggcacaaaccatgagctaaatagggcctcaagcattctacttttccaaacaccatggaaattatagtgttaaaaaaaccaagagagaggaaaagctatagtgtagctgtattactcatggatctccagagaaacagaaccaatagaggtatagagagaaagagatttagtataaggacttggctcacataattatacagactgacaagtcccaggaactgtagggtgagttgggaagctggagacccaagagacccaatggtgcagttccattctgggtccaaaggcatgagaaccaggtgggcaggtggtgtaaattccagtccaaaggttggtaggctgaagacccaggaagaaccaacatttcacttcaagtctgaaggcaggaaaaagcccatgttccagcttgaaggacagtaggcaaaagaaattctttcttacttgggggaggttcagccttttcttctactcaggcttttgactaattggatgtgtcccactcacattagagagagccatttgctttactcagtataccaatttaagtgttactctcatccaaaaacaccctcacagaaacactcagaataatgttaactgaatatctaggcatcccatggcccatcacagtaaccacgtcaaatgctaagcaaatagttttccttttgtttgtcttaatacaagtgaaacttttgtttttttcctttttttattattccttttgtccatctggtttagtataaacaaatatttcttttgaacttcaacaaataagcaatagatggccagtaaaattgcacagaaaactcttttccctccagctaaagcaacttcaaaatacatttatttaataaaataaagaatcaataaaattttaattttaagcagtcagattcaatgccaagttgtcctggaaagaaatttgataggaatgcatgctccttcttttctttgtagcacatgtcaggttacaatctggtgcaaagaaagatgtgcagctgcaaaactagtgtcccagatctagccataatgatgtaaccttgggaaagattttgctctcaaataactgataatttgataaggtgggtaagacaaacaaaaaagacagtagactggtaactacctaaggaaggtgcaaagtactgggggaatcaagaacagaagagcccccatccaggtggacatgagcttcacgaacagtctttcagaggaaaccaccctgatttacagtaaactcacccctttctggggtcacacttgaaacagaatagctatacccacaaccactccatccagggacaagaactgcgttcattcaaactcatgccacgttgttttttctctcggctctgctcagagtgaagttcatcgtgcagcaatgagaaaagcccccataaagtcattctgacataaatatctatagacaagaactgtcaccattgtccttgcgaactcgtcttgaagaagcattccaagatgtgtgcaaggggtgtatgcctgtgtgtgaatgaggacaaggaggtgtgcagctcttctatgattcttgcctcagactaactagatagctttcctatcagtaaataagggcacactgagtatttgctgtgaaccaggctctatcatgaggctgtaaacaaagaactcagatcctgtcctccaggagcttggagtctagatggtcatagagcattaaacaaataatgacaagtgcagacataaagtatagttacaagtttaaaactaaagcctacacagctgccatacagtgattctacctctgttctatggttctaggatccactgctgcaaagaaaaggattattactcttgtccttgtactgggttgtgttgcaaacgtctgcctcagctccctgaagacagtcctgtggcctcagcatggagtcctcactcagtccctgggaccactgtactaagcagtggttcatagcctgtgtgagcaaaaggatcacctggggtactagagggtagatacctggcctcactctcccagaaattctgattctgtggatctatgctgtatttgaaaaagccacctgagtatttgaaaacccacttcacataatagcagacagtatatgaaccaccccaagaaaccatgtgagaccaatgaactaaagaccaatgaactaaagcctccaattttccttatccagacaaattaaaaatgtaatttaattgatatgctacattagtttcagaatatctcaaaaaacatatattcacaaaatagaataccttttcctgccttcaaaagacagtaagttgcaaatgattacattctgaaaatagaggaatgttcacaatcctgatatttaaactctttgtaatgaggttttttttagtatataactttaatatgtgctccaaatgaataaaaagattattcatttatcattcagtttttttaaatattaactggtaaatccctcttttaggaagcataaataaatacctaagtgtaaaaaatatgctaaaccaaatactaaatactgccaacaattcataatggaaataaaatcagcttcaaaatccaagctaaaccacagattaaacagagggttttcatgtgacctcgaaatcaattcttttgttttcttttgccatttttaataacaaacaactgaatttttttaaaaaacatattttcataaaattgaatgttgttctttcacataacattgattctaaggcaatgtcatcaatagtcacaagtaaaagaaaaggaacctccaaagccataaattcgattggaactgagataccaagtttgtgagtaaagatcagcaaataattttttacaagatattaagacttgtaaggcttaagatataagcccagaatgatacaaacttagacggacaggcaggaagagtaggaacaggaaaaacgtgtttcccaacatgtcattgagggttattattaattcagaaaaaggaaattttgtgttaaaaatttcaaaacaatgaacattaaaactgctcagttgcaaggtcagcactgaaaataaatagaaatggaatcattatttcaattagtgaacagttatcatgtagatgccccagttctgatacagagatctatgttagagacacagggtaagtaatacacgcactcaccacctagcctgcaaagtgacagacagatgtgcagttcatgttggggcaagatgtctattgcactggtcctatgaagcagtgattcagaaacagtaaagagggcgtggtgacttcttcctggggagtatgattaggatggcctcacagaggtgagtatgttgcagattttgggttgggcaagtctctgggtcaaagcttcattagcttggggcagttgcttgtttaatttgcttggagttccttctttggacttcgtcttgattttcattacaaattcttcctggggagtccttcacgtccatgtgttcagctatcatccacatgtttatgactcccaaaactatgtcctgaaacaaaaacctccttcctgtgattcaaaatcacagccaaattgccttctggataaactacaggcctctcaaatttgacacttgtaaatcaaaattcattgacttttcccctatccctgccctcaacccaaacctctacatcctctgttacttgccttttcaatgactcgcacagcccctcaactagtgcctaagacagaaatcatacgtaatctcagactccttcctcttctctccatatcccagccaccaagcctggcctctcccacttaaatcccacattcctcttattcttccacagttgcaatcataattgatgctctcagcctggtttacctggtatctctgtctccagtctcattcccttgcaatccacccttggcacttctgccatgatggactgtaattgacagctgatgattttgtttctcttattaaaatcccccagtgctgtctcaggataaattctgtactcctcatgaataaattctgcacctttcatgaactgaggcctctcatccaccatccttttttcgcactgccccaggtaggcactcagagctcttcccatacaacactacttcccatgccttggcatacaccgtcttctctccctttctatcaacagaccaccttcttggccagcccaacctctgcccagctcagtgacttcctcctttggggagccacctctgacatccccaggctgagtcaggtcaccctcttttccccctgcttcctgtggctgtcactattgaacacaccttccagggttggtagtactaggactctttgtctgcctcctgcaagctgacatgtgaagctcaagggcagaactgtgttctgttcattttttttttttttcttttcactttaagttctgggatacatgtgcagaacgtgcaggtttgttacgtaggtatacatgtgccatggtggtttgctgcactcatcaacccatcgtctaggttttaaagcctgcaggcattaggtattcgtcctaatgctctccctccccttgccccctactcccaacaggcccggtatgtgatgttcccctccctgtgaacatgtgttctcattgttcaactcccacttataagtgagaacatgcagtgtttggttttctgttaccatgttagtttgctgagaataatggcttccaacttcatccatgtccctgaaaggacatgaactaattctttttttatggctgcatagtactccatggtgtatatgtgccacattttctttatccagcctgttcatctttatagtccttgtgcctaccacaaagcttaacacataagaatacttcaactgtttgtggattatcttaattaagcaatgccattcactgaatttcatgattattcccattcaaaaggaatagttttaaaacctcaggaagcatgtgactatccaacaaattatacccctcgaaaacaaactaccaacagcgaaactccacactttcaagttatataactatcatacaaaagcaaccgattagtatggaacatttgggtcaaccagttgtttttttctacattgtaccaaacacttgatttggtggtggtggtggttgtttaagtgttgcttaaaccattatattatctcaggcttgcaaggcagctgagtcaatggagcagttgtttaagtatcatgtggactcagtgtgcagctttggcagatattactgagttactgcaaccaattctcaccagtgcttttttgagcatctacttcatagcagatgaatccacagaccctacctccatgtttctcagaatcttagcccctggaccacctttatccaactcacctgagagtcttgccagaaatgcagattctggcaccctacccacaatatcctaaaccagaacctccagaggcagggcctggccatgtgcattttaagaaggtccatcctactgatataatccaaactcaagtgtgagtggcactggtctactcttcagtcagtcctacagaaagtgtaaagaaaggataaagaagtagggtgatgagggagtgaggggagccaagcaggagagtgacgtggtagaacactggaacagctactcacaaagagatccaatacagtaatggtatacacaaaaagagtttatttctgtttcacataaaagtctggttgtatttggtcctgggcttatacagaggtatcatggtgtcaaggactcaggattcttctatttcttctattagcgcttttcttctattagatcttctaatactttgtggttctgccatccttagggtctttctcttaatctataaagtctaagagttgttcattatcacctcctcatttcaaccagacagaaggaaaggaagagggtcccttccccttaaaagcactagccagaaggtaccctcgccatggctgttcatattccacagtttacccacctatctccgtccaactacaaaggagagggagaaatgtactggggaaaggagaaacccgtgtgcccagctaaaatgtgagttctgtaacaatggaggggaaagaaaaatagataatggagtcaacttgctgcctctgtcacctgagaggagaaggggaagcgggaggggaagagtaggaaggggaggtaaaagggaatgaaaaagaatataaaatttactattgtccatttttcaaaagcccctacccctgcccacccaccgccacacatctattctagtctgctgttcctgattttctaagcttctttaatcaagcctgttgcattcactttcactcacacccctctagccttggccttggacattgactttgattggaaaacaatctgctgccaattcttccaatattatcagcataatgggctgcaggcacaatctgtttctcaaagttctctgctttatgttaaaagtcaggggcccaaggatgaatttcaaacaatagagttgccttatttgcggttcgagatggttggtcagtcagccctatcccagcactctttgtaggtgaatgatgtgggcagtgttgcagacctgtgcttgatgaactgaatctccacgtgcataatcaccctgactttcaggtgaaaactgccctggtttatagtctggttgctggagaaagtctaaagtgtgaaggaacaggtagcctcagtgttatccggacactctagctaccttcctgtggagtaaggattcccatggcctcatgcccaaagtgctgacgtctcaagaacaaccccctccagcctttcactgacctaagatgaaccatgtgacattcattccatggatcagacatcaggtcagaccttattgcttttggacagcagccattacatgatttacggagcaaaggataggtacaatacaaacctcagagtacgtgacaaagttagagggtatttctaagcatgaaaatatgcaacatttcaggagtaatgtcataaaaagagggatcagaccaacagatcactgtctccatttaactgtaatctctaaaaataactttagctctcatttctgagtcagagagaaactttagaagttacattcatgcttttaggaggcaatatgtaacccaacttctccaaaactaaacttaaatataatctaagtcagaattcaatcccccaaggagatttcagtatagactcagattcacaaagcagaggaagagataatgtggttttattccaaagcgcagacttaaacacatggcaaccctcatcattctcaaagttcccaattgcttcatttgctcccaagagtcaagtggcttctataagaaaattacatgcggtcagaaaattacaggaggcctggttctttgggagtaatgatccattcatttgataatttgctaaatgcttactctttctgctcgtcattttttcctcctggttagtacatcatgcatatggtgacaagagataaagaaatggacaagctcccagaaaaaacagacaagaaatgggaccaaaaaaagacataaaatgtcttttaaaataagcttaatattttgaaaaatgccttttatgaaaaataccagtggaataatttagatgtacccttgtagcctcacagatgctgatttttcagatggtggtgccacatacccccaccactggcatggatcccactgcaaagggcctctggggacatccaagcacaaccctgaatagacatctggccatagacaaatcctccttgtctccagagacttctacaggattccaactctagtttttaaaatgtgagtatatgagacacatgggtctgtaggctctggttttagaggtgaatccttcacattaatgattctgagattgattttctcctttgttggcccttcttgaccatttttaccttctcagtgaccacgtttcagtgctcactaggacctggaccgggggcagggtaaaccgaggtaagtagctctgtgttactgcctgctactatgcccacggatgtgtggtgatgagaagggtaaaacaaaaagccagaattcctttccaggatgaaataaatgcaagataagcacagggagctgctcaggtgcctgaggaaggtggccaactccaaatgtccacaaagtgtccatgtcaggtgacccaaaggtgcaaaaaacaggcagactgcttctgtgcccagtagcaagaatatcaagtacgtcaggtctttttggtgtggcttaatacagcctacttaaaaggaaaaatagaaaatctatgtgaacagtttccagctgccagctctaatttcccatgatggcccatgacaaggagtgcacagtgttattgatcagttatgacattatcagaaaagggctgaatggagtttgctctcactcttttctttctctttgctctttgtcagtgtccttaggaaatgtatctaattcttaggcttctccagccaagcaggatgggcaagaagacatttatactggatggcttctaaaaacatgttataccagtttcaatattttaggaaaataactgtacaataatccaatattaacagaagaaagaaaatattcattcaaaagtgcctatatgctcatgtcctatgtatttcatgtcttggaccaaaatattctattcttctcatgaaaccacttatagttaccaagctgaaaaatcaaacagacattatgttttagcaaatttcttcatttcccttttgagttctttggaaagaagagaacaaagtgcagagaaatacttattctctaggccataaaatcaggagggcaggcctgtgatctattgaatgttgagcaccaagctcagtacctggcacgtaatagttgctcaataaattttgttaccacatgctgaatgactccaacaagtaattagatttttctgccactcccctctattcaaagctctaacaaagaactttttaaaggtgtgagcccatggtctctattaaagagttttccattgcaacttttcttcttctaactagtagctttctcttgtatactcaaaagtcacctcgtttagcttagtcatggagcatagaggtttgaagtcatgcaaacatggattcagctacctggttctgccacttgctagtgtcattacaacttcagcaagttgcctaatttctctgagcctcatttttcccacctataaaggaccataatatttccacaaggctatctatggattaagtgaataatatgtacaaaacagctcacaaagtgcctgataatagtctatttatgatgaccactttattttaaatattgttataatcattatcatcactggtatccactggaagctttagaataatcctatagcatgctttataattaaaacactgttatatatctaattaagaaagttttcttgctcatacatttataagctgttcttttgtactgtatgataccaaaggaaagttacctatagtttttgtaatattcagggacagacaatattcaagtatgcaaattcttgaatgcaaatttctttaatgctttctttagtagtctatacaaaactttaatatatatgtgtgtatatattatatataatatatacattacatgtattatatatacacatatgttaaatatattatatattataaattatattatataattaaagataatatattaaaatatgtaatctataattatctaataaatcattatatatattatataggtcatgtgtagtggttcatgcctgtaatcccagctctttgggaggctgaagcaagaggatcctttgagcctaggtgttcaatcccagcctaggcaacatagtgagacccagtctctaaaaataaataaataaaataaacaataaataacaaataaataaataaaataaacaaataaaattatacatatactatatatatgtacatattatatacatacacacatatatatataatttgccattataagctagctgtaactttcccaaggtcaacagcctgtcactggccacaaaacacaaaggagaaagtagtatatatctacacatcctccaaagcctaaggctgcaaatggctggcatagaaaacatccagtcctactgtacctgaatactccctctagaaggttcttagaatgaatcaaaggtgaaagagggcatacatggaagccattgaccagcccccaactccatacatactgcactccatcctttagaggcataataattggttcattcctacttgcaattcagaaatattaattgagcatcttcaatgtgctaaacactgctttgctttcaatgatggaaatgaagtggtaagcaaaacaagaaaagtgcctgccctcatggagcttgcattccagagtaatttgtttcttggtagcaagaacaaggaggctgagtaacagaccttacagttggtgtatgatatatttttcaatctttctaaaagttcttaattatctgctgtctaacttgtaagccaaatttcattccttctgtgcagaatgacatggccagtctgaccaccaaatacgatggggctttcttaactattcaagtacactgttggcaaaagatagtgggctattcaaaatgacatgccgaaacatgtatggtgattttaatcaattattttggccagtttcaaaggcatttatcacaaagtaacacagtcttgctaaaatatttctttaaacacagagttctttgttcctacacctttaagaagtaaagggaatacccagacactgtacctgttttgtaagttaaagtgaaaacatactgcactgaaacttatagttgatatctcttcagaagagaaattcatcagcaaggtaataattcccagtagctacacaaagaaaccacagtcttcagaaaaaccacataacagagaatggaatactgtgagcagcccacataattactcatgatagataagtgtattaaaaattaaatataaattattgcaggcattatagttttggcacaagatgaaaaaagtgctttatgttacttaaaagttttaataactgccttaaatttggctcagttgaaaataagcttatcctgagtaaatataaagcatttattatttgaagtattgctttcaatacaattgtaggtttaaaaaaaaacaacctctttgattttctaaaagttgctatgtggcattgatcttttttaaaagtactaaaaagagatacaaataggtgaattttaaacagggttgttctaaggaggattactttaacatatgaaaatctcttaccaaaactctgctaaatcctaaaatcaaatccagatgattttgaatctaaatgtgagaggggaaaaaataaatcttttaaagaaaaacataagagagtatcttcatgaccttggagtaggcaaagagtccttaaataacacaaaaagcactaaccttaaaacaaaaaagataagttagattatattaaaattaagaatttctgtttatcagtactaagagagtgaaaagaaacccacagagtagaaaaagatgcttgcaatacacgtctccaacaaagaactgacactcagaacatataaagaattcctggcctggtgccgtggctcatacctgtaatcagcactttgggaggccgaagctggaggatcacttaagcccaaaagtttgagatcagcctggttagcatagtgagaacttgtccctactaaaaaaaatttcttaaatttagctgggtacagtggtgtgcacctgtagtcccagctacttgggaggctgaagcaggagatcacttgagcacaggaggtcaagactgcaatgagctatgatcactctatgcactatagcctgggcgacagagcaaggccctatctaagaagaagaagaaagaagaagagaagaggaggaggaggaggaggaggaggaagaagaagaagaaaacgaagaagaatttctacaactcaattcaataagaaaaagaaagacaacaatagaaaaatgagcaaaggactttaatacctacttcacatagaacgatatcctaacagccaataaatacatggcaaggagctcaccttcatttgttgtcactgaaatgcaaactaaaaccacaaggagagacattatacttccatccaagtggctgaaattttaaaaagaggcaaatacccaatagagcaactgacattcacatacactgctggtggggatgtaaattggtacaaatactttagaaaactgtttggcagtatctgctaagcagaggtcttcaaaatgtggtccctggaccagtagcaaaagcatcacctggaatttgccagaagcccacattcttgggccctactccatacctactgaatcagaaacactccaggtgtttcccagagatctgtgttttaacaaaccctccaggtggttctgatgcgtgtgcaatcttgagaaccactgtgctaaagctcagcatatgcatagcctctaactcagaaactgtactcttaggaatgtctaccagagatgtgtatgagctttcatcaaaatacatgtacaagagtgtttgcagtagcactactcaaaacagccaaaaactggaaactatctgatatggtttagctgtgtccccactgaaatctcatcttgaattgtagctcccatgatccccacgtgtcgtgggacagacccagttggaggtaactgaatcatgggggagggtttttcccgtggtgttctcatgatagtaagtctcacgagatctgctggttttataaagggcagttcccctgcacacgctctcttgcctgccaccaggtaagacatgcctttgctcctccttcactttccaccatgtttatgaggcctccccagccatgtggaactgagagtccactaaacctctttttctttataaattacccagtctcgggtatagcagcatgagaaggaactaatacattacctaaatgccatcagtaggaaggacaaacaaagcatgctatagtcactaagtagaagtctacacagcaatgaggctgcataatctataattgtatgcaacagtgtagatgaacctcacatacataatgatagacaaaagaagccaatcacaaagctacacatcttgtaggattccatttgcagaaagtacaaaaaaaggcaaaacctgactctgctattacaagtcaggatatggttatgattgggagagaccagtaggtgaagactgcaagggctctaaggaaggcttctggatgctcccaccattttttttttcttgagctggggttggttacagtaatgatctgtttatgaaaatgcactgtgctgtatgcttataatgtgagcacttttctgccagtatacaacaatgaaaaggttttcttaaaacttgattaaaataattcttttcaaattgtataataagtgtgaattactttaggtagaatatttgcattggaaaaagtttaggacattaaagagtaatgtcctaatattccactccagggaattgtcatcaatatggcagaagaagaaaaaagcttacaagatcaaataccaatgaaatcttccctgaatgactgcatcaaggtactaaaaatggtccctggggtcagactaaacaacagaaacccaccagtgggcatagttcgtcagtaaatctgtgctttaataattaaaatgtaagcactatatttatataccccttaattccataagaattttcagtggttgtaactgcattaacccactcatcagtcaggttaagcagccatcagcggaccatgagaagcaaaggggaaggtcaggcacattaactacctgatgtttgcttctgattaaagttggcttatttatttatttatttattttgccagcagagtcagtgaatttttaaaaagacaatgattgtcatctcatctctgttgtcagcaaagccctcattccaccttgagctcccttttgagtagccagggctctgggttacacatgggctcattctgcttttaccgacaaggatgctgcattagtccattttcacgatgctcataaagacatacctgagactgggtaattataacaaactgtctctcagaccacagtgcaatcaaattagaactcaggattaagaaactccctcaaaaccactcaactacatgaaaattgaacaacctgctcccgaatgactaccgggtacataacgaaatgaaggcagaaataaaggtgttctttgaaaccaacgagaacaaagacacaacataccagaatctctgggacacattcaaagcagtgtgtagagggaaatttatagcactaaatgcccacaagagaaagcaggaaagatgaaaaattgacaccctaacatcacaattaaaagaattagagaagcaagagcaaacacattcaaaagctagcagaaggcaagaaataactaagatcagagcataactgaaggaaacagagacacaaaaaacccttcaaaaaaatcaatgaatccaggagctggttttttgaaaagataacaaaacggatagactgctagcaagattaataaagaagaaaagagagaagaatcaaatagatgcaataaaaaatgacaaaggggatatcaccaccgatcccacagaaatacagactaccatcagagaatactataaacagctcaacgcaaataaactagaaaatctaaaagaaatggataaattcctcgacacatacaccctcccaagactaaaccaggaagaagttgaatctctgaatagaccaataacaggctctgaagttgagccaataattaatagcttatcaaccaaaaaaagtccaggaccagatggattcagagccgaattctaccagaggtacaaggaagagctggtaccattccttctgaaactattccaatcgatagaaaaagagggaattctccctaactcgttttatgaggccagcatcatcctgatatcaaagcctggcagagacacaacaaaaaaaagagaattttagaccaatatccctgatgaacatgaatgcaaaaatcctcactaaaatactggcaaaccgaatccagcagcacatcaaaaagcttatccaccgtgatcaagtgggcttcatccctgggatgcaaggctggttcaacatacacaaatcaataaaggtaatccagcatataaacagaaccaatgacaaaaaccatatgattatctcaatagatgcagaaaaggcctttgacaaaattcaacaacgcttcatgctaaaaactctcaataaattaggtattgatgggacgtatctcaaaataataagagctatctatcacaaaaccacagccaatatcatactgaatgggcaaaaactggaagcattccctttgaaaactggcccaagacagggatgccctctctcaccactcctattcaacatagtgttggaagttctggccagagcaatcaggcaggagaaggaaataaagggtattcaattaggaaaagaggaagtcaaattgtccctgtttgcagatgacatgattgtatatctagaaaaccccatcgtctcagcccaaaatctccttaagctgataggcaacttcagcaaagtctcaggatacaaaatcaatgtgcaaaaatcacaagcattcttttttttttttttttttttttttttgagacggagtctcgctctgtggcccaggcgggagtgcagtggcgcaatctcggctcactgcaagctccgcctcccgggttcacgccattctcctgcctcagcctcccgagtagctgggactacaggcgcccaccatcacgcccggctattttttttgtatttttagtagagacggggtttcaccgtgttagccaggatggtctcgatctcctgacctcgtgatccgcccgcctcggcctcccaaagtgctgggattacaagcgtgagccaccgcgcccggcccacaagcattcttatacaccaataacagacaaacagagagccaaatcatgagtgaactcccattcacaattgcttcaaagagaatgaaataccaagtaatccaacttacaagggatatgaaggacctcttcaaggagaactacaaaccactgctcaatgaaataaaagaagatacaaacaaatggaagaacattccatgctcatgggtaggaagaatcaatatcgtgaaaatggccatactgcccaaggtaatttgtagattcaatgccatccccatcaagctaccaatgactttcttcacagaattggaaaaaactactttaaagttcatatggaaccaaaaaagagcccgcattgccaagtcaatcctaagccaaaagaacaaagctggagacatcatgctacctaacttcaaactatactacaaggctacagtaaccaaaacagcatggtactggtaccaaaacagagatatagaccaatggaacagaacagagccctcagaaataatgtcgcatatctacaaccatctgatctttgacaaacctgacaaaaacaagaaatggggaaatgattccctatttaataaatggtgctgggaaaactggctagcaatatgtagaaagctgaaactggatcccttccttacaccttatacaaaaattaattcaagatggattaaagacttaaacgttagacctaaaaccataaaaaccctagaagaaaacctaggcattaccattcaggacataggcatgggcaaggacttcatgtctaaaacaccaaaagcaatggcaacaaaagccaaaattgacaaatgggatctaattaaactaaagagcttctgcacagcaaaagaaagtaccatcagagtgaacaggcaacctacaaaatgggagaaaattttcgcaacctactcatctgacaaagggctaatatccagaatctacaatgaactcaaacaaatttacaagaaaaaaacaaccccatcaaaaagtgggcgaaggacatgaacagacacttctcaaaagaagacatttatgcagccaaaaaacacatgaaaaaatgctcaccatcactggctatcagagaaatgcaaatcaaaaccacaatgagataccatctcacaccagttagaatggcaatcattaaaaagtcaggaaacaacaaggtgctggagaggatgtggagaaataggaacactactcaactccactcttgtagcatgagaaaagtcatagacaccacataaacaacagtgcatgtgactgtgttccacatcgtttacaaaactatctacaaaaacaagcagagggctgggtttgatctgctggccatagtttgcaaatgcctactcttcgagttgatacgaacattactccttttaaaggagaccagactctagaatcactccaaatgcagggaaatattttcagctatccaaaatcaatcacgggcactagttgctggcctctgacctacatcatttcaggtctgcactgctaataggtgtcaggttcagaggctggcacgggcgctgttcttgaatggtcctgagtacacccacccatgtgagcaggacaaataagtccccttgaagggaggcacctgaggaagcctaccggtctaagtgcgcatgaatgtaggtgtgaaaacacattatctcactcagcagagagtacagctgggattgcccaagtgatgtggtccctatgatgtaaaatatgaaaatgtcttccaactagtttcatcaatgaaatctttgtgggtgatttcttttaagccattacttatgcctcttgaatcgtgtgtttgatttcattgggtaattatttcgctagatacaagggaccctgtcagaatatctttactgactaaaaacaagctatgcttttggtgccctggaaacatataacaatactatataatattaactaagccaaggcttagctgggaagttactggatctcctgttccttttcaacactgtttttgccccttctcattgtcatccttctcactcttccctcttttccaaccatgttttatgtttctgtccctctttctcttgccttaaaccaatcaaaaccaaacaaataaaaggaagtagagagcagcaagacttcatactgaaaacgtccttaaaggaaacggctttcacgtttatcatttttttcattattttgagtcagtttttgagagcaagaacatatatctttactatattaaaaatcagagtcactctaaccatgtaataaacccagaacatgtattcatggtaactatacctccagtggtttatgatttaaactcagaaagtttctttaattaatctctgctatgggtttgatatcaatgtcaattaaaagcagcacatgatgacccttatgcaatgagataagaataagaaaactgggaggctgaggcaggagaatgaggcgaacctgggaggcggagcttgcagtgagctgagatcacgccactgcactccagcctgggcgatagagcgagattccgtctcaaaaaaataataataagaagaaaacactaatatattggtctgacatagaatatgcaaatttgttcattataaaaataaatatgtctgttgaaaggctggcaaataaccaatggctcactgataataccctctaatcccaagaaaaaaacatagaccaaaataaaaagaaaataaacttcgtataaagatgagaaagcaaagtgtccccttgttacgtaatattagaatgctctctcatacctacggttgctttcgttctatgtcaaatgaaattacgctgcccacctgcaggtgctgggaggaacaagttagaggctccatggaaaagcatcttgaaaatagccgagtgctctgcaaatgcagatcgttatttatgcaaaaaaaaaaaaaaaaaggcaggaggaaatccatctgttctaaaacctctcccctcaatatgcttccttattatctacacgaattaaagatgggtttatcaaattcgcgtttacaattatgggatgtgggttaaaataatcacacacacaatcagaacccatggctgactacttacaacatttcctttgtcattctgtctaggatgagattgtgttttgttattgaaccataaaaaatgtcattaacccttggttcattgttaattcttagaaagctagaatcctttttgtgtctttggaatccctttcacacacagccagttggatagaaaatagaaggtacctgagaggtgaggaactgttagtgaattgatgtggaagcttctaaaggcattgctcctgaaatgacaagtttcagcaggaatagaagctgagggccttcccaccacagatggccagattgggtgccttctgagcccactgtctagctcaagccctagcctgtcaatcctgaaaataccagcaagtactgtcctcctgctagtagtattatatatagtgtgtctcacaaagacccagaggggtcagatgaatgagagcttaaagtaattcgcacactcctgagccaacagtcctgggctccaacccctaggccatcacttaaggctctgagaccccaggatggcactcagcatccaggcacttcacatcctgtgaacatctgtcatgctttggacacacacacgcagacacacaccaacacttcttaaacactctgcctgtgtttagggctatctctcccttatgggtcttctctcccctagaaataagccagaacctcatttcccaagacttccttgcatctaggttgctgatatgtgatgcaagctttgtggatctgacacactcccaagagactttaaagcagttgagagcaatgtggacaagcatgagtgccctacaatttttttctgttgtgagagaggaaatagaaggctccagctttggagaacatcagcaaaaaggtctccacattagtgataaaagctgtggtatctctgccctgtgaaggtggcagaaggtcatcacagactttccacccttacaagagtctgaagtacccaatacatcctatactaacttccatgtatacttaagcaaattagagtatgtcccgctgctgaacaaactcggttgtttcacttatcaaatggaaataataagaggtgcatcaaaaaatgttaagaatcaccaggaacacccagctcaaagcacctagaacataggcaaaaagcacacgtcgaatgtgagttcttcccttactttttgataatcaatacttttatttttctatttattttcttactattaacatgttatgtcttcttttactacctttttaatggttaacctgaagattacaacacacttttttttttttttttttttttttgagatggagtttcactattgtcgcccaggctagagtgcaatggtgcgatttcggctcactgcaacctctgcctcccgggttcaagtgattctcctgcctcagcctcctgagtaactgggattacaggtgcccaccaccatgcccagataatttttatatttttagtagagacagggttgcaccacattggccaggctggtctcgaactcctgacctcaagtgatttactcgccttggcctcccaaagtgctggaattacaggtgtgagccaccgtgccaggccacaacaggctttcttgatttatcacagtcatatacacagtatcattttatcaccaattttactagaactttagagctgtctgactccatttacctcgccatctcttttgctttactgctattgtacacctaatttattgcatcagttttaaacttcatgagactttataattattgctttgtacaatcaataattacttctatttagcctcttgcttactcatcctagtatgttcatttcttcatgcgaccatttggaattgttttccttctgcctgaagaaaaaaatgttttctttcagtacagacctgctagccatattccctccattgttatttctctaaaagtaccttcccttcactttcactattgaaaatatttttcattctatttctgtggtgggttttctttttcttcacttgaaacatgttttattgtcctctggatgccactgtgtctcatgagcattcagctgtcagttttgccatggctttttgaagggtaatgtgtctttttctgaagttgttttggtttgtttgtgttttttgttttaagttctgggatacatgtgcagaacatgcaggtttgttacataagtatacgtgtgccatggtggtttgctgcacctatcaacccgtcatgtgggttttaagccctgcatgaattaggtatttgtcctgatgctctcccttccattcccccgaccccgtgacaggccccggtgtgtgatgttcctctccctgtgtccatgtgttcttattgttcaactcccacttatgagtgagtacatgtggtgtttggttttctgttcctgtgttagtttgctgagaatgatggagggagtgtaaattagttcaaccattgtggaagacagtgtggccattcctcaaggatctagaaagagaaataccatttgacccagcaatcctattaccgagtatatacccaaaggatcagaaatcattctactataaagacacatgcacatgcatgtttattgcagcactatttacaatagcaaagacctggaaccaacccaaatgcccatcaatgatagactggataaagaaaatgtggcacatatacgccatggaatactatgcagccataaaaaagaatgagatcatgtcctttggagggacatggatgaagctcaagttgtttttaaggtttgattttttttactttggccttcagcagttttactatgacgtttctaggtatgtttttgtttgtatttctatcattcaaaatcccatgtgcttcctttttttttgagacaggatctctgtcgctcaggctggaatgcagtggtgtgatctcgactgactacaatctccacctcctgggctcaagcaatcttccctcctcagccccccgaatagcagggactacagatgtgccaccacgcctggctaattttctgtatttttgcagagacgagtttcactatattgcccaggctggtcttgaactcctgggctcaggcaatccacctgccttggcctcccaaagtcctaggattacagggatgagccactgcacctggcctccaagtgcttcttgaatctaagggttcagtttggtaaaattctcagccattatcactaaaaattttttcagctacattatcttcctccattcactcagggaattcaattttgtatatattcgaccttttcagcatatttggcatgggtcttacacacctatttttttttaaatctggccctacgtgttcattggtcctgtgttctgctgtgtccagttaactgctaagctcaatatactcctaatttcagatattgtatttttcccattatagaatatccatttgatttcttatagatttttagtatgtggcaaaagtctatccttttatctgttttgtccattttctctatttttgagcatattaatcatagttagctttaagtccttatctactatttttatttttattttatttttatgaaacagggtcttgttctgtcactcaggatggactgcactcatgtgatcacagctcactacaacctcaatctcctgggctcaagtgaccctactgcctcagcctcccacatagctgggactataggcacacatcaccatgccccgctaattttttaatttttttgtggagatggggtctcactgtgttgcccaggatggttctgctaattttaatatttgatcatctgtgggtctttttatctgtttttctcttgcagccaaattataaaacatgcaaaagtcaaacttgggaggctgaagcagatcacttgagcctagaaggtcaaggctgtgatgagctacgatcactctactacactccagcctgggcaacagagcaaggctctatcacaaaaatcaagacttttgcatgtctgataattttccattgtattccagacattaaaaactgcaaacactccaggtgactttatcatccactaaggagaattttctttcctctattaagtggatattgtaaaggactgatcatttcaatccaatcgtgggttaagctgaaaatgggttaggttttggtttttgtaagactcatcgtacctctgcttttcctccatttctatgatatgggaatcctagcgttcgtggtgatgctggtggggtctttggctcttcagccataaaggatcccgggagtttcagctttgcccttcagagatgttgaccttagctctctatcttcccactagtgcagccaaaaatgtcttgatggggagactatccaaccgtttgtttctcattccatacccagaaattggtcagtgaccccagaggggtggagagtagatggtaatggccagttcatcctaaaaggattccctccttgctttcttagatctctgtgcctacaaaaatatgctttttgtaaatttaaattgtatctattttctcccaattgttgcagcaagagcactggccaggaccttccacatcctggcaggaggtcccccgccctcctttgtaacaaatgatctaactggtgacttgattcttattaagcaccctgaaatttttcattaataacagaagaaattggaataaaagcagatcccagacaacttgactgttgggttttaagaaacatttaaaatggtgtttgtttcattctcagatctgaagaacattttatttggaataagaaccactttttacagacagaccaggttgacagaatttaaatcacaatttccagttcagtttcaatttaatcattccatttatacaaaccacaaatcaaaataaaaccattgtgacagaagagaaccgttttgcctataaattttatccttgtgattaagacatgcttgtaataaattatttggtttttgttaaaacaatattgattcacgttaccccaccctcagtcagaataagctccacactgacataacagaaaaagaactgattgttaaaaacctggaaagcagccaagtttacaatagattgctcctcctgtttataaaaagctgctataactgattattgcaaaaaatttcctccaagcaatgcacacacaagttgctgccttgagaaatatggaaagttagaaattagaactttacatgtagtgtataaatctaatcagtgcaaggaatgagtgctgggaacccacaaaatactgtagggaagacttcttgcatggccctttattcttaggagtacaatgactcttggagaggatcagtggcgcttctggcttaaaaatgcaacaggggcttgtcatatttaggtgatgaactacgtgatgtttgtgctaatttctgaccctttcccatttccatggctattcgcccttttcagaactcctccacaaccacctaattggtgtcttctttcgccctaaattcctgaggcccttgctaagtcctacccttttaaagttataccacttcaccttcctaaacttatcactgccctccccttccaccacactgctgctgctacctgtgccttccttgggggagacttgcaaggagagtagaatagaaattcagaaaataagcattttaaggcccttctatcttaacagggaggcacagcccaccttatgtaatgcaccgggctagtcctggccagattaattgaggaaatgggtggttgttcttgcagaatgagctgggagaagaatgctaacattaattgttcacagtttccagccctttctttggttgtgccttctttatcctgtcatagctggtaaaaaattcaaaggccacttttattttttcaatcaacagcttgacaggatctaataaaaatgcaatccctttaatggacaggttaatgcactggcgaattgaggtctagggcccctatacctggcacacacacaatctttttcctgaaacagctcttcccttcccatcaaagggtatgaattttttgtccaaacaatctcccactctaaacttaatacaaaagcttggttggtgttgaaatttgggtggggcccaccaaatctaaagctctatagttcaggggaaaaagccgcatagtattctagaatatcaaatgaaaccaaaacactctacctgccaagcatttccagcagccaaataccaatgttagattgaggtggatggttcaaacctaacaaggtcaaagaggtgctgcttaaagagctttcaatattgtttctttaacaaatggcctgtttccttgttctttcatcaagcagagttttttccaaagtttcaaggtctcaaaatgtgtaagtcgctttttccatattttgtttcgacataaatatatttatttataattatttaagttacttttacatattcgggaaaatatacatctttttcaaaacacattatatacgcttttactgtccttaaaagatggcatatggggccgggtgcagtggctcacgcctgtaagcccagcactttgggaggccaaggatcacgaggtcaggagatagagaccatcctagctaacacagtgaaaccccgtctctacaaaaatacaaaaaaaattagccaggcatggtgctgggcacctgtagtcacagctactcgggaggctgaggcaggagaatggcaggaaccctacccaggaggcagagcttgcagtgagccaagattgtgccactgcactccagcctgggcaacagagtaagactccaactaaaaaaaaaaaaaaaaaaaaaagatggcacatggaccaggcatgatggctgacgcctttaatcccaacattttcggagcccaaggtgggtggattgcttgagttcaggagttcgagactagcctggacaacacggcaaaaccccatctctacaaaaaatacaaaaattagtcaggcatagtgggcccacctgtagtcccagcaactcggaaagctaaggtgggaggatcgtgtgagaccaagaggcagaggttgcagtgagccgagattgtgccactgcactccagcctgggtgacagagcaggaccctgtctcatagaaaaggtagtatattgggatatttttgcccatacaggtgaatgaccagactactgagatgatgactaaatgacagcccatcttctttggtatgtccatctctgaccaggaattccaccacttctgaggcacccaaaaccagtttaatttcaacgaagaatctgactgaaccaagaatattttcatctctcagtcatccaacctacaaacctgactcttgtcccttatttcaaccttgagccatacccaaaagcttcatgcacatttggagataccttcctttacaaaacacctgaaatctgcaatcccctgccagttcttggtgtcataatctttacccatggctgcatcgacttgttggctattgtgtctctaattcaataacacatggattcagagagactatgagtcaaatcatgtcccgtccaaacataactacacacagaaaagtcctgcatgacacagtatgtagggtggatattagttttggctcccttttctgacttcaaaaaatgaacccaccatgaaataacaattgttaacttcacagatcagcacaattttacaaagcactttcagcaccattatctcattcgggccccacaagaactccatgaagtcgacaaagcaggcattatccttattttaaagattatgaaattaggatccagaaaggtcaattaccttcccaacagctcccagctggtaagcggcagagtcccagtagcacaatggttccagcccatcacacagcctcagaaaaactctaattaatgtagtcttagcacaaagtacaggatctattcgagcattataatcagcaatcattgggataaatatctcttaaaattaacccttctgaatgtgatgccaagttattagaaagctctagcaccttgagacagtgtttcacattgtagcgcttaaacttctctcctctctttctacaagttcactaggctcttcgtcccttctctgctgcatattttaaagttacaaatatcctattatgttaaaatggttgggaagtatgactttattattcaattatgatgtgacattatcccaatagtaatgtaactactttttaggatccactttgcacttacacaactcccctcccccaccctgtcagatcctgtctttatttaaaattttaatattttgctcatcatggatgtttgtattttttatttaaaaaatatattactgagccagttgcagtggctcacacctgtaatcttagcactttgtgaggctgaggcagaaggatcacttagcagaataaaactgaaaatcaactccaaaaggaagtgtcaacattctacaaatacatggaaattgaatataatctgctcttgaatgatctttgggttaacaatgaaattaggatggaaatagaaaaattctttgaaataaatgattacagtgatacaacttatcaaaacctctggggagatgatcattatggcagacgagaggcaagactagattgcagctccaattcagatggacagagcagtgtgcacaggcttgcatcatgaattttggctccagaacgactgcaagaacaaaccaggaaccccaagagggcccacagaccctctgaaggaagtggactgctcctgcaggacccgggagacactccaaatactgtgattgctcaaactgcagaagtgggaaagggagatcctccactcctgagcacacatccccacgggcgaaactgaaggtttagtttgcaggacaagtttccaaccttacctggagctgagtcaatttagagagccaagcaaaatacaggggtagaggaagcagcaagaaaggccttgggagctcgctgggtccccaagcaggccattcctgcctggcaccacagagatcctttgggaagacggccagaggcacagaagaaaatgccacagggagaaggaagtcttcagctgaactttgtaacaatttgaaccagacaagaagcctcctggccagaacttgggggagggcgtgaatccagcattgcagactttacagagaggggaagaaccatgcccttttctttcacagctgggaggcaggtagcctggggcaagttctcaagccccgctcacccactgcctggaaacagactcaggcctgttagtgggggcacagtgggagtgagaccactcctgcggtttgcatgggagctgggtgaggcctgtgactgccggctttccccgacttccctgacaacctgcatgactcagcagtagcagccataatccttataggtacacaactccattgacctgggaacctcacccccatcccctacagcagctgcagcaagaccctcccaagtagagtctgagctcagacacgcctagccctgcccccacctgatgggccttctacccaccctggtagctgaagacaaagggtatgtactctggggagttctagggccccacctaccactgtttcctctccacactaccacagctgatgctctctagaaagcaccacctctcagcaggtggccaaccagcacaaaaacagagcattaaaccaccaaagctaagaaccctcattgagcccatttcgcccccctgccacctccactggaacaggtgctggtatacacgactgagacccacagatggttcacattacaggactctgtgcagacaacccccagtaccaacccgaagccaggtaaacatgatgggtggctagacccagaagagagatgataatcactgtagctcggttcacaggaagccacatccacaggaaaatggggaaagtactacatcaagggaacacccaatgggacaaaataatctgaacaacagccttcagccctagaccttccctctgacagagcctacccaaatgagaaggaaccagaaaactaactctggtaatatgacaaaacaaggctctttaacacacccaaaacaccagcaatggatccaaaccaagaagatatccctgatttacttgaaaaagaattcaggttagttattaagctaatcagataggcaccagagaaaggagaagcccagtgcaaggaaatccaaaaagtgatacaagaagtgaagacagaaatattcaaggaaatagataacataaagaaaaaacaatcaaaacttcaggaaacattggacacacttacagaaatgcaaaatgctctggaaagcctcagcaatagaattgaacaagtagaagaaagaaatgcagcgcttgaagccaaggtctttgaattaacccaatccaaacaaagacaaagaaaaaagaataagaaaatatgaacaaagcctccaagaagtctgggattatgttaaacaaccaaaccaaaaataatcaatgttcctgaggaagaagagaaatctaaaagtttggaaaacatatttgggggaataattgaggaaaactttcctggccttgctagagacctagacatccaaatacaagaagcacaaagaacacctgggaaatttgtcacaaaaagatcatcgccaaggcacattgttatcaagttatctaaagttaagattaaggaaagaatcttaagagctgtgagacaaaagaaccaggtaacttataaaggaaaacctatcagattaacagcagatttctcagcagaagccctacaatctagaagggattggggtcctatcttcagcctcctcaaacaaaacaattatcagtcaagaattttgtatccagcaaaactaagcatcatatatgaaggaaagatacagtctttttcagacaaacaaatactgggagaatttgacactatcaagccaccactacaagaactgcaaaaaggagctctaaatcttgaagcaaatcctggaaacacatcaaaacagaacctctttaaaacataaatcacataggacctacaaaacaaaactacaatttaaataacaaaaacaaaaatcaaggtacacaggcaacaaatagcatgatgaatgcaatggtgcctcacatctcaatatcagcactgaaagtaaatgacctaaatgttccactttaaagatacagaactgcagaatggaaaagaactcaccaaccaactatctgctgccttcaggagactcacctaacacataaggactcacataaacttaaagtaaaggggtggaaaaaggcatttcatgcaaatggacaccaaaagcgagcaggggtaggtattcttatttcagacaaaacaaactttaaagcaacagcagttaaaacagacaaagaggggcactatataatgtcaaaaggcctggtccaacaggaaaatatcacaaccctaaacatatgtggacctaacactggagctcccgaatttatttaaaaaattactaatagacctaagaaatgagacagacagcaacacaataatagtaggagacttcaattactccactgagagcaacagacaggtcatcaagatagaaagtcaacgaagaaacaatgaatttaaactataccttggaacaaataaacttaacagatatatacagaacatttcatccaacaacaaaatacacattctattcaacagcacatggaactttctccaaaatagaccatatgataggccacaaaatgagccttaataaatttaagaaaactgaaattacatcaagcactctctgagaccacagtggaataaaactggaaatcaactccaaaatgaacgttcaaaactacgcaaatacatggaaattacataatctgctcctgaatgatcattgggtcaaaaatgaaatcaagatggaaaaataaaaattctttgaactgaatgacaataatgacacaacctatcaaaacctctgagatacagcaaaggcaatgctaagaggaaagttcatagccctaaacgtctacatcaaaaaaactgaaagagcacaaactgacattctaaggtcacaagtcaaggaactagagaaacaagaacaaaccaaacccaaacccagcagaagaaaggaaataattaagatcagagcagaattaaatgaaattgaaaccaaaaaagataaataaaacaaaaatgctggttatttgaaaagataaataaaattgataggccattaggaagattaaccaagaaaagaagagagaaaatccaaataacctcattaagaaatgaaacaggagatattacaactaacaccatggaaatacaaaagatctttcaaggctactatgaacacctttacggacataaactagcaaacctaaaagagatggacaaattcctggaaaaatacaaccctcctagcctaaatcaggaagaattagataccccaaacagactaataacaagcagtgagattgaaatggtaatttaaaaattaccaacaaagaaagcccagggccagatgtattcacagtagaattctaccagacattcaaagaagaattggtaccaatccttttgacactattccacaaggtagagaaagaaggaatcctcctaaattcattctatgaagctagcatcaccctcatatcaaaaccaggaaaggacataatcaaaaaagaaacctagagaccaatatccctgatgtatattgtattagtctgttttcacactgctgataaagacatacctgagactgggaagaaaaagaggtttaattggacttacagttccacatggctggagagccctcagaatcatggtaggaggcaaaaggcagttcttaccatggcagcagcaagagaaaatgaggaagaagcaaaagcggaaacccctgataaacccatcagatctcttgagacttattcactatcacaagaatagcacaggaaagaccagcccccatgattcaattacctccccctgggtccctcccacaacatgagagaattctgggagatataattcaagttgagatttgggtggggacacagccaaaccatatcaaacgtagatgctaaaacccttaccaaaatactagctaaccgaatccaacaacctatcgaaaagataatccacaatgatcaagtgagttttataccagggatgcggggatggtttaacatatgcaagtcaataaatgtgatacaccacatgaacaaaattaaaaacaaaaaccatgtgatcatctcaatagatgcagaaaaagcattcgacaaaagccagcatccctttatgataaaactctcagcaaaatcagcatacaagggacatacctcaatgcaataaaagccatctatgctaaacccacagtcaacatagtactggatggggaaaagttgaaagcattccctccgagaactagaacaagagaaggatgcccactctcaccactcctcttcaacatagtactggaaatcctagccagagcaatcaggcaagagcatggaaaagcatcccatgctttttaatagtgaagtgttgatcctggattcgacttttgccatccagtaccatatcaacatcatcactctccatattgagttttacgatgtgtaaagcaacactctctctgcatctgcctatcagctgctattttgggtgaatgtttggtcttagattcttcacctcaagggtctcacatcttcaaatggtccattatcgatggtgctgatgatccctgtaagtcctctagaccagaggtcagcaaactttgtaaaaagcgggacagtaaatgttttaagttttgtggcgtcagagagtctctgtttcactactcacttctgctcattgtaatacaaaagcagccatataaaaggcataaataaactggcatggctgtgctccaataaaactttatttccaaaagtagatggtgcactggatatggcccatgggccctaatatattgacccctactctgtacagcagccttgttctatttgttgggttttttcaatagaaattgaaaggatgaaatgatgtcttcatacttgcaagatgactgatcattatcaacttaatggaaagggtacacttggagagtagagaaagacatagatgacctgcaaagccagaaccagaggtcccctcccagagccactctacacggaaactcccataatgccattaacaggtcctaaatgcctggcagagaggagatgatcaataaagactggtaccattattattatcaggactagattaatacagcatatgttactgaagttgttgaactatcaactaaagacaaaaatgttttttaatcaatctcatctcatagtttatggaacaggaattgccagcttccttttcatgggaagaaactgaggccttggtggttaaaaacagaaccagaaattccaagtaaaaggcagagatggtaaaaccagatttgaaacccttgccaagcacagacacatgtaggcaccactcatggccgttttcttgagcaaaatggcccacaaactattatacttgcagatttagtccattttgcccaataagaattaattctattgcagcaacttgaggctccaattatccctaaactttgaaactctgccagttcactaagaaactttttgttgttgttgttgttttgtttgtttgtttgtttggtttggtttttgagatgaaatttcggtcttgttgcccaggctggagtgcaatggcgcaatctcagctcaccgcaacctccgccttctaggttcaagtgattcccctgcctcagcctcccaagtagctgggattacaggcatgtgccaccacgcccggctaattttatatttttagtagagacagggtttctccatgttggtcaggctggtctttaactcccaacctcaggtgatccacccgcctcagcctcccaaagtgctgggattataggcatgagccaccatgcccggcccactgagaggttttatacatggaggcagccagatgttggtggaaagggcatgccatgagttggagagcctcagaggtttgggttcaagtccttgctttggtttctctgtgttttagttcactcacctaatgaaatatggatcataatacctactgagtgagtgttatggtgaattctgtctcctcaaaaaatgcgttggagttcaaacttgtagtacctattaacgtgacgttatttgaagacggaatctttacagaattaatcgagtaaagacaaggtcattgaggtgagctctaatccaatatgactggtgtccttataaaaataaggggaaaatttgggccccaaaacaaatatgcatacagaaaacacaaagtgaagatggaggcagagattggaattctgctgccacaaaccaaggactgtctggaactaccagaaaagctggaagaggcaaggaaagatttttcccctacaggcttcagagagaacagacaggaccctcccaacactttgcctttttacttcctctggattttttactagcctccagaactgtcaaacaatacactctgttgttctaagccatttagtttgtggtactttgttaccatagccctagccaagtaaccttgtgaagactcaatgagataatggaaacaagtgcatcactccatggccaagccatgatgtatgctccagaatgtttgtggaagacataagcgttcttttaaatgtctagtttccatttagcaaacccctagtatgtggctgttagtcagttttgcattactataaaggaatgcccgaggctgggtaatttataaagcatagatattttattttggctcatggttctgcaaacggtacaggaagcatggtgctggcattagcttctaatggggcctcaggaagcttccaatcatagtggaaggcaaagggggagcaggtgtgtcacatggtgagtgagccagcaagagggggaagggggaggtcccgcactcctttaagccatcagttctcacatgaactaatggagcgagactcactgattaccacgaggacaccactaagttattcatgagagatccgcatgccccaaacccctcccaccaggccccacatctaacattagggatcacatgagatttagaggggacagacatgcaaactatatcagtggcatattaggataccttgtgtatgttctcgtcagtaattcttacaataatgctatgaaatatgggggttatcagtctcacccacattataaatgacgagactggagcccaaggaggttaagtgacttgtgcaaggtgacacagctgggaagtggtcactgcgtggcactgattcatttagggtaagtcaccaaggtatcctgaatgcagcaatgacattagaggaatcaagtggtcagagttgttcaaaagcatgttccacatgaatatgtaacataagggatccataacattggaaagcctattctaagcaatttcagtggcatacttcatactatagacctttagaagtattatgtaatttaattccacaaaaggatatgaaatccagaggatatagtggacatagagatgtgctgcctatccagatcctccttcaaagaagggcttgcaatcaaaaccacaatgagataccatctcacatcagtcaggatggccatcattaaaaagtgaaaaataacagatgcagggaggttgtggagaaaaaagaacacatatacactgtttgtgggagtataaattagttcaaccattgtggaaagcagtatggcgattccttgaagagctaaaaacagaactaccatttgactcagcaatcctattactgggaatatacccaaaggaatataaatcattctaccataaacacacatgcatgtgaatgttcactgtggcaccattcacagcagcaaagacatggaatcaacctaaatgcccatcaatgacagattggataaagaacatatggtacatatacaccatggaatactgtgcaggcataacaaaagaactaaatcatgtcttttgtaggaacatggatggagctggaggccattatccttagcaaactaaacaggaacagaaaacccaataccccatggtctcacttataagtgggagctaaatgaagagaacacatggacacaaagaagggaacaacagacactggagtctacttgaaggtggagggtgggaggagggagagaagcagaaaagataactactgggtactaggtttaatacctgggtgatgaaataacctgtacaataaaccccgatgacatgagtttacctatataaccttcacatggaccctgcacctaaaataaaagttaaaaaaaaaaaagaagagcttgctgcccaagctgtcaactcctttagtgttgcctgagctatagaaagacctcgcccaatgtcatggtcttctggtgcagtctacaccgagtgactgaacaagaggaccagctacttcagaatttcagtgctgaagggtcatgctcgctgtagagctccccacttctaggctggcagaggtgttgtcaggcctgtattatgggtgggcatctccctccttagcctactctccctgccctactttcttcattagacattgtttcctactgatatgctgcacaccaaactccatctctatgtctgcttcagagaacccaggttttgcatcttccttcagctggcaagaaacaatattggcccagatacgaagctgataaaatatccagggagagaaaagatcctaaaatctaggcccttgtaacttgagaccagaaggacaaaatgcagtgaggtgtgaaggaagggcttaagtgcctgtaaaaaaagctccagcccagtctctggacagatgtgaggtcccattgacttaaaatccaaagaaagaatctccgtgaaataacactaaaatgcaagagttcatcttccctgcagcgttcagaaatagtccctctattatctgtagaatcaaatctgtaagaccagataactgtattttaaaggaatccatgataagaacattggaacttgatatttcaaattcaatggatcaattccaaaaaacgtacatgtatggctatgaaaagcctactaaaataaatggcatttcagattctcaaagtcattgaaaaaaagattttgaaagtcttgtgatatgggcaaaaacccctggctgacaagcaattgtttcctatgtatacatattcacatgtccacttaaggtcaagatcaaaagaagctaagtaagaacagaggagaggaaggactaaattgttccttgagaatttttgagctgattaaaaatttacagagaaaagaattcattccaaacattcacttcggaactcccgtttgaagggagcctggtactttattgctaaaccctgcctttcaagtgatctgattaccccttatcagggaccattagtgtctcaacccatccgctgttcgaccttaatttccttaaagaaaaaccttctttggcatgcaactcctcccctggttcaccccatggagtatccaaggaataaagacacactgaaacatccggcaccaaaaagtcaagtcacctcctgccaactctaacacaccattccacactcccgccacagaacaataccatcttcctgccccaagctttgctgagcaacagaaagacaaaatggcatccaatgttgaatacgatgattacgaaatatgtagcaggccagagtcaatgagactgtgagagctttcagccctgccttttccatttatgggtcaggaaccagaaacccacagtcacatggggcagtagaggtcaagtctagatttccgaattcaaaccaggcttaattccactacaaagcgtcaccacccacatcatatttttctcccacagcatgacttaaggagaaaacaaacccttcaggctgatttgatctaggaatgtcatctctcctttgttattatatgcatgtggtattatagacattttaaagataattcgggaaaactgagatccaccaccaaagaataatggctagggaagaagaacccattttgaattaaaatcccgtgcatattggtctcattttaaaatgtggtctctccctagtttccactaaggggaaaaaaagatacagaaaagaagatatagaaaaagggggaaccctataagaacagtgaaactatgactggcaggcaaacttttaccagaatgtggaaggagatgccactaattacaaagataaatccaacagcgcccctctggagctctgattttcgtccatcaccatgctcagaatcgcaggtctgtatgcacagaaaaacagctcagccattcccatagggtgtgggtgtgggtttgtcgatagttaagagtcccttccgagccggactttctacttttatctcaaagaggaaactaactaaatgacatagtgactgggagagaggggtgaccaaggagggcgttgcagggttggtgggcggctccaagctcttgagtgagcaaagagcctcaggaggtggagaggtgatgcaggggcagggggcaggctttgtcatgcgtgccaccagttcagggtcaggaaagcaaatggcaaagggagaatcaggggtcacatgtaaattaagtggttgaaatttaaagggttgctggtgagaccaggaagaatggcaagaaaacatttgtcatcgtaaagtatatctctgctttatggctggttaaggaaaaaggaaacagatttgattatacagaagacaaacctgaaatttgtaggaaaagttaggtgctcgggatgaatgggaggagatatggaggtaaaaatgaagaccaagaaaataacagataacccagaatgacttaaatactgtgaattcttgaggaggaaacaagagaggctgaaaagagagctttgatttaaaagcattcatgaggtcaggcaccgtggctcacacctgtaatcccagcaccctgggaggccaaggcgggcagatcacctgaggtcaggagttcaagacaggcctggccaacatggtgaaagcccatctctactaaaaatacaaaaattagccaggcatggtggtgcatgcctgtaatcccagctactcgaggggctgagggaggagaatcacttgaacctgggaggcagaggtttccctgagcccagattgcaccactgcactccagcctgggggacagaacgagactccatctcaaaaactaaaaaaattaaattaaatcattcatgaaaactttaaagagttaaaaaaataaccaatatgcagaggaaaatttgtatttaccatgttccaacctaaactgatgagagaagcccccagtgaaaggtgttctaacaactcttaagtcatatgaatggattcaaaaggcatataagtattcaaccagaggaaaaaagaagccatctacaacagaacaaaaaggaaacaccttcagttgttccttctataacactaaaaactaagggaaaatgcaatacaattttggctaaatttaaatttaagattattaagagatggccgagtgtggtagctcacgcctgtaatcccagcactttgggaggccgaagtgggtggatcacgaggtcaggagttggagtccagcctgaccaacatggtgaaaccccatctctactaaaaatacaaaaattagccgggcatggtggcacgtgcctgtaatcccagctactcaggaggctgaggtgagagaatcacttgaatctgggagacagaggttgcagtgagccgagatcgtgccattgcactccagcctgggcgacagcacgagattccatctcgaagaaaaaaaaaagagagagagatacaccaaatggtcaaaagatgactcaaaaacaataggccttcgtgatataaaaggactggtgacgaacattaaaatttattaaacaaggtctaaataaatgttataaaaatgctgaccatattaaatataaatgtaaaacacttcccaaaacaatgtattaaaaaaattatttaatagcaataatctgaatcctgaaacctagtttatatttttaaaatcttagaaataattgtatgactatgtcaaaacagctcacgtactccataaatatacacacctatatatccacaaaaattaaaaataaaacattacgtaaaaaaaatcttagaaataggaaaatagagttaaaacacattaagccgcttgcttgatatagaaaacttttaaaaattatctcattcttcattttgattattataggaatacatattttaaaagtttttataaatttaaagagccattagtaaagttaaaactaaagtacattgactcaatctcaggagagtgtaaaggttaaaaataagtaagtacacattttttaaaaactaaaacattagaaagaggaataaaacattttttaaaagtagaaactttctcgcaaaaataaataaaaacattaaaagatgatcagattgaattttttaaatcaaatatattttgtcctcaagagatattttgaaaataaaatgaccaggaaaactttttttaaatgaacaaagatttgttaaacaaatttttaagtggatttaaaaataggaaagtgtagcaatatttatttctgacaaagtggaatttcaggtagaatactgaacagtatagggactgaaaatttatatcaataaagatagaatttaaaatgcatacataataataaacctttcctgaatagcatatcaaatatatgaagcaaaaattatttcagataaataatatttaaaggagagaaaccattatatagaaaataatacacatgcctaaataacctttgatttaaaaattaaaacaagccaataaacaaagtatttttaaatgtgtaaaattttaaaatatataatcaaaactctagagataggtaagtttacattttaattctcttagtattaaaaaggaaacaaaaaaaatgaactaagcccacaatccaaaaaggaaacaaatctaaagaaggcagaaaatattttacaaaaccattgtcattcaacaaattatataattaattgataagtcctggagctgattctttggaaaacatgtacataaagacacacacatttctagcacttaagaaaataaaatcagaaaataaaaatatacctatgtaaatgaagtagaaatgatcacaaataaaaagattataagttataaaacatatttttatagatctatgctaataatatattcacaaaatgacagattcctccaagaaaatgttcattatcaaaacaacagcaaaagcatctcatgtggacaagccaaaaactatggaaaatttttcaaaagttacccaaaattcatctccaagaggctacataccataacatgtttttaggtaagctcttttaaaaaagtaatagattatttttatgttatataaatcacctcagagcacagaaaatatagaaagcctaccagcacagtttacataatttgcccaattctgaaaccaaaaccagagaagagaggaaagaggaaatccaaaagaaaaaaaaaaagaggaaaaaaatcctattatagaccaatctcacaacaatagacacaaaaattctatataaaataccacaaggtgaatttcatattattttagaagaatggcccaccataatcagattcgcacaaggaatgctgggctctttaatattaggcattgtattaatataatatgacacatttgggccaattagggaaacagcatgacactcttcagctagataaaaagagttgctagagtcagctgttcacatactaaatagatatcagagaaaaaataagtttccagatatccagataattctttaagaagaaaaggatcaaagtgtaaattatccagatgtctgagattaaaacattcattagttcaaacagaatgtcctctgagaaagagaaatagaactccagaagccatttccttcttattacaagcaataggaatgccccattcctaaagaaggccgtccagaacgccaaccttactgcaatttggtgcaggccattggccctctgttaggccatggattctctcttgctctgctcagtgtctagcctcagctcaagtcccacttcatcccctccaggaagctcctgctaacaccctcttctcttccttccctcctgacctctgggacaaaactctctgggaacactccgtcctgttcactatttccttgtctgtctctcctgagaccacaaactcctgcaggccctggtttgtgtcatataatttcattatccaaccctgcaacacagagtaagtactcaattaatattctttgtttaattaatcaatataccaaaaattttcaagtacatatctgtattaatttctgtgcagcaaaacaattctaaattaataatggagtcatgttttcctccaacaaatcagtccgaaaccctaatgcaggcatgcacataggtacactctgagcaagttttaagtcatttcctgattccagccctggcacttgagcttttagagcttgccacatgaatctagggaacaaaagctaaaaagcattccgctgtcatttttcttcctggttctgtttcatctgtgtagacagtgagaaaacacaactaggccaatccaggtttcccatttcaattacctgctggtaaagggtaatcttcaaatgaaactttaaaccaaagaatttaccttactcagctaatggcccaaatgtctccttcggcaaaacccaagagaatctccctctcttttaaaaggcaactttctgttttttcacattgcctgcaccaagttacactaatcaagaccacactaatgtggccacgttccaccccttaaccaattggccaagcttcatgggaataaaaattgctccaaaaactgagaatcctaagtactgcaggtactaactggggtggggaaagcctgttctgcttcattactcccacactggaattatattataacatagattaaaaaaaaccctggaatccaccaagaaattgactgacgttaatatttgaggaaatggcaaaggaaagttgttcaatttttgtgtgccttgttgcattctgggcttagggtttgctgctctactttcttattgggtcttgaaatggattttttttttttcaagagacaggatctagcactgtcgcccaggctggagagcagtggcacaatcacagctcactgcagtctcaaactcttgggctccaatgatcctgccacttcagcctcctgagtagctggaactctagggacaccccaccacacccggctaatttttttttattattattatctttatggagatggggtcttaatatgttgcccaggcttcaaggagttttgtttgtttgttttttgggtgttttgggttttcttgagacggagtttctctcttgttgcccaggctggagtgcaatagcatgatctcggttcactgcaacttccacctcccgggtttaagcgattctcctgcctcagcctcccaagtagctgggattacacgcatgcgctaccacacttagctaattttgcatttttagtagagatgcagtttcaccatgttggttaggctggtctcgaactcctgacctcaggtgatcctcctgtctcggcctctcaaagtgctgggattacaggtgtgagtcaccatgcccagcctcaagcagtttttttaaagaatcaggacagtcgtaaacgttcagttaaacagaaggtggaaggtacagcctaggagggtgctagtggattgtctgaagaaagcaaacagcagacagacaagattagcattgacagcaagaccacatccgcatcacacaaaaggaagaggaggctggcaggaatccaggaaaccttagcgatgaagtcagcaaatccaaattattccgtacaaatccccattttccaaaagatgggccaggtccataaatatatccacaagcccgtcggctaaacttgtggacgcctacctaaatatttcagatgtgggagcagagcgtctactgtgttaaaaagccatttttacccatctctttacatcacaaagcaattatttctcacctgccactttaatttgtactgacaacctaatgtcggacactaccaaagagaacaaatgaaaaatagaaagaatagttagtctcctatatgacatatgtttatgccaaaaagattagttaaaaatccatcttcctctacctgaatttacaggatgtttgagggaactgtcaggaaaatcattactaatgaagtaccagactatgtgaaacaatggttacaaaggaaatttaaaagacaagtgcaattgcagatgtcacagatttttcattagcaaaggaagatgctgggaaactttatgtttttggaagagtctgtgatcattacaagagcgctatatcttatccaatcctgtattcccatccaactctcagccttttctctctactcacactcctcctactatgtctgggtacttgacctctcctataaaaactggaaaggaaattactgtgatcctccatccctgccaaccaaacaccagacctcctttttggctagcactgcctatgatattaataaaccatccatccttgaactacccattcaaagtgacctacaaatatgcaaaccatcataactcacccagctccctgaggcatcccaatatcccacccaggagcccacaggaagatagctttgcccatgaaagggatggggcttagtctaaagatatacacccaactatgcctgtggccactaggttctcgcacggggagtacgagcagtgaaatcacaaagagaggatgggaaagacaaagagcaggagtggaggcccaagggtggtagtttgcaaagtgggctcaaatgattcatctgtccacacagataggccctccgtgccctttgtctagtaacttgatctttttaatgaaaaagcctggctatgcaaccaaggaataatgggaagacatcgcagcaagaagaaaagagcaagaattcaccatcctcagacttctcctagaacattttcatctcagtttctttttattgcccacgtcaacttgagaaaccagacttgcagtggcttggcccaccctagacttttcttcctcccaaagttcacgcattggccaacgttgtcattccccatttccttggtgctaataaaaagagcaattgtatctcacgcttgcattggcaaatgaatgagtgactgggaatgtggctccatgaccactatttctataaaatttgttctaaaaaaaattcaacaaaaatactaataaaaacctttatggtgaaggactataaatctatgaagtggctcagagtccaatttcccttttttacatacatcaaataccaagaatcagactcataacagttgtgagatggcttagtgagaccccaaagatgtaccaatcccacaggttgggattcacctctgaatccatacaaataatattcccattgtatcgagtgtgtttttagttagaaaaactctagttcttatatcagggataggtaattaggattattttgctttgagcaaaacccatgaagctgaaaaagtcaactcatttgtgcagaggagagggaactctgccaagtcctgagacataaacctggacctagacctcagcctgtgcaggagataggaggacagccaaggtttttgactctacactcctccaggaatccagcctgtgcagcgccaggggccctgagagcccatggagacagaaggatgcaacagtcagggtgacagcatcctcgcctagccaggggcatggcagggctccaacgtctgtgggaaattagtgtgcagactcggggctgacgaagaagtctcccctagggactgctcacccaaggtctcaggagagatgagggtgcgacgttttcagatggggtaggcagcacacctggggctcaccagacttacagtagaagagaatggaagtcactgcagatcccattcaccggtggaaatgggctgccctatacaccagttggaataggctgaagaactgagcaggactgaacctgcaggtagatgggctttctacccacaactgggccaggctgggatggacacaaccatggtgaaaaagatacccagaggcaagatgggcagcagcccaggtccatttcacatcagtgaggaagcactgcagcccttgtgcctagaaacagcacttttattacaggtgctgctgatgggctgagtcaagtgttaaacgatgcgtttgctgttgaatagaaatcacttctgaagcctgtactctgttcggttcccaagcatttactgagcatgagcaaggtgttggcatctgaagatgagcaagtggtaaatgtgaacacatcaatcctcgccacgtgttaagcgaccacagaacgtttcagaccccactcgtaaaccactgctttttttttttttttttttttttgagacggagtattgctcggtcacccaggctggagtgccgtggcgcaatcctggctcactgccacctctgcctcctgggttcaagtgattctcctgtctcagtctcctgagtagctgggattacaggcctgtgccaccaaacccgactaatttttatattcttagtagagacagcgttttgccatgttggccaggctggtctcaaactcctgacctcaggtgatccgcccacctcggcctcctaaggtgctgggattacaggcatgagccactacacccagtgctgcttctttactttgtattcaacaagggaatccttgcttaggagtcaagttttacattgacaacagcctttctgagttttgttatttgtttgtttgcttgcttttttttttttaaacgaagttttagctccacggctttttaaaaaatatgaaattcactttacatgttttttctaagtggattttataatgtatgtaatatggatagtgttaagactgtgtagcaggtttcaggatctaatgactgtttttaacttagaacttcggaagctatagaattaataagaactttttgttttttacttaacacttggtgccattttcacatcaccaatatatgatacacaaatgcagctgaggaagacacttcatactttctcattgtttctgtgaatagcatgaggcagtcatccattaagtggagtaatacatggaccctttttataagaaaccaatttcacacacttacctctcctcatctttagaccctacctgctcagtaagtttgagggtggagtagaggatgtgcctgtggtggttcatttcctatgtcagcctgaccggccatgggggtgctccaattaagcattattttggggtgtgtctgagagggtgtttcagacgagagcagcatttgaattggtggattcataaagtaaatggctctccccattgtgggtgggcaccatctcatctgttgagagcctgcacagaacaaaaggcaggggaaggaggaattgatcctttttgcttcctgcccacccacctgagctgctacagctcatctgatctcctgcccttagactgggagctacaacaccagcttccgtggttctcggggcttcgaacttctcctaaattacaccactgcctttcctgggtctccagcttgcagaaggcacagcatggacttctcctcttctgtaatggagtgagccaattcctgacaataggtctgtgtgtgtgtgtgtgtgtgtgtgtgtgtacacatgtatatgtaaagggtttgttttattggttctgtttctctggagaaccctaatagggtgctcctggagtaatttctattcaataccaaatgtatcagatcatcagcacgggcaacttgttttaaattataatatttcttaaacacaaatgatcaaaaactagaaataaactccttctgattagagcactgctgcaactataaaattaaaataatatttaaaataaacacaatcaaaacagtaaaaagccacacaatttcaagttgatatatctatgttaacatgcaggtagtgatgtgactatacctgtgactgccgaggcatctgtggtctgagtctggcctgtggcatgaccatgagtgccatgagctatgtgtttccccaacacttctctccactcacaccatggcgagtctttgcttagacagcacttaggtgataatctagatccttcacatgcagtgaaatctcactgtttatatcctaggtctaccttgattcctttttgcactggcatatgacaaaaacatgagtctctgctgctttgctacaccagggtctcttcaccacagcatgcccacggagtgcttatcaccatctgcttaatcagtttcacaatggagcatctcctcattgtctctaacttcagcccctcttcttttcagaggcaggtgctgagatgcctcccaaaatcagacttggaatgatagtcccagattgtgccaggttccaagaatccacgtagagtttaggttctaaaacaatcacccaaggcaaaaattaaagtctaaattatgcttgaaattttcctaaattgctaatcaagtataagatacatagctttatctacacagacctctatagtaattattttgctcgcttaagtttaagaaccactgaaacagactgctacagactgaatgtttgcgtcccctcaaaatgtatatgttgacaggctgggcacggtggctcacacttgtaattccaacactttggaaggtgaagactgaaggatcacttgaggccaggagttcagaccagcctggcaaatatagcaagacctcatctctacaaaaaatttaaaaattagccaggtatggtggcacatggctctagtaccagctactcaggaggctgaggcaggatcatctctggagcccaggagttcgaggcagcagtgagccatgatcattcccactgcactccagcctgagtggtagaatgagacccagtctctttatatatataaaaatatgtgtgtgtaatatatatgcagtttatcacatagatattttgcatatgcaacgcagttctgtaaattcagtgttgcattgagaatttattgtccttccatatatatatggaaatcctaacccttaatgtgatggtatttgaaggtggggggctttgaaaggtaatcaggtcacctcatgaatgggattagtgcccttataaaagagacctcagagagctccctcaccacatctaccatatgagaactcagtgaagacagtattctatgaaccaggaagtgggccctcaccagacatcaaatctgccagcaccttgattttggacttcccagcctccagaaccacgagaaataaatgtctattgtttataaaagccacccaagctatggtactttaccatagcagctcaaactgactaagccacaggcttaaaaaacgaacaaaagggaattttctccatagaagtctgggtatctaaaccatcccacatgttagacaactatagtccctgggttgaatgggacagcagtagagaattctaaagtgctcttgcttgccagaatttactcccttagtttctaatattgggcatctaaacttaacctgtgttagtagatgcagtcatgttgtgaaatctaaacaagaaaactgtggagtctcatcccaggacaagtatatgaagtaagctgttaagttaaaagtgcatgcaatgcaattctgtaaatacaacgttgcattgaaaaagtaattgtccttccttgtttagtcctataatcaattcatcaaacaatatttccctaaaatctttttgcaaataaggttaattttgttgaaatatccaattctgcatgtatttactgaagaaaaaaatgaatcttattaaaaatcaaggatagtatactgtgcccaaaatatcagattttcactgggctgagaatcaggagaaatacatgtggcacataaaggtgccacctgagaagaagcaaaaggaatgcttggttattaagacagagaggctgaaatatgatgacagatctcataccctaaatcaaaccaaacccacaatcagagtatctgggtctgcataattttcccaaaaacatttcaacttggtgcatttgggccctcttaaagcaatatagtctctgtaaatattccattaaaagaatcgaaatgattaagataatttaaaaattgtttaaatgtaaaaataacatttaaaattaaataaatacataaaaataatccacatgattgattgtgttcaattgttccctggttgtccccactcaactctggcctcctatcatcaagaggaactttttttttctatattaattgcctttgttccttctacagccacttggctctgatcatatcactcccaatccctctggttatcccactaagaaacctggaagtcattcttaatgctttctttccctctcccttacctccatatttaagcaatagcaagccctgatagttactctgggtaaaccccaaactatcccctcttcacctgtgctgccacatccagtccagacaatcagcatctcccacctgctctattgaagcattctcctaattttgcatccactctctcttcctgctgagctcttctctgctcagcagccagaatgaccttctgaaaaagcaaatctatcatgaaccttgacttgatccttttacttaatgcccatttctcctggaatcatggctgaatccctcccaacctgccaggcatgttccccatgacctggcccccgccaccgtctccagcctcagcaggggctgctctcccccactcactccatcaggtctctgtggccttgcaagggtttcatgcatcctcagcctgggatgaccctactcctccccatccatctggccaactccaccaccctcaatgtcctttcatcctaggaagcctgaaccccccacctctctagaccactccccttgttacaccttctcgggacaaggtaggcggaatgacccccaatgatgtccacgccctgatccttaaaacctatggatatgttactttacatgagataaaggagtgcagatgtgattcagctaagagtcttgagatggggagcatactctgggttatccaggtgggcccagtgtcatcaaaagagtccttaaaagcagagtaccttcctcacctgcaatcagaaggtgatgggaggacagaagacagaggacggatcagagaagtgacattactggctttgcagatggaggaaggggccatgagtcaaggaatgtgggtggctccagaaggggggaatgtcaaggacatggatatccccccagagcctctagaaggaacacagtcatggcaacagcttggtgttagcctggtgagatctatggcggatctgactcacagaaatgtaagaaaagaaatcggtgttgttttaagccactaagtttgtggtaatttgttatacagcaataggaaaccagcacatatggtgtttgtggtatttgtcatcactgtaatattggtaattactgaaatcatgtgatggttaaaaaaacacagaccctggagccagacagactgggtcaacctcccaccatcccactcactagccaggctccttgggacaagttaacctaagagactcactaagtttccatcccctcatctgtaagaaggtggtcatcgtgcttacccccagggttgtactgagaataacatgaaataatatgaggaaagtatttagcacaggggctggcacagagggggccttcagtacaggtgagccccaatgagtattatcattgttatttgtgggattatttgttttccccttggggttataagctccgtgaagacagataccatgactttattgctcatggctatatttccaggaacaagcacagagcttatcagagcaggtattcaaggaagaaatgaatgaatgggtctatctgtgaactactgacccagtgtgccccacgaaatatgctgggcagctgctacctatgcaggcattatgccaagtgctgaccaatagaaaaggggaggggagcgtctcttattttctaaaacctttcagcagcccagggtttccaacacatatatacagggtgacaacacaagacagcatggaccaaatggtacaagaatgtcaaagcagggggcactctagaggtaagaagatgaaatggtgacattatcttggatggtctaggaagctttcctggaggtgtgagatgtgagtgggtctctgactctacgtgaagtttctattggatgggaacaaagaagacaaaacattctgggggtcagtaagtggcattagcaaaggtacagagacaggcaggttaaaggtcctcgaaagtgtcattttgacttagattaagaattaatgccaaggactaggagacatgagcctgtaagagaaacgtttgggttggtttttaggtggtcctggatgccagctaaggatgatggattgccccctaaacagaaacgagggtcagtgaagatatctgatccagggcataacaaactgcaacaagtctacagggtaatggcagcactgggccaaagagctgtctgtgatggtgaatactgagcgtcaacttaattggattgaaggatgcaaagtattgttctgggtgtgcctgtgagggtgttgccaaagcagattaacatttgagtcactggactgggaaagtcagacccacccccaatctgggtaggcaccatctaatcagctgccagcacggccagaataaaaggcagaagaacatggaaagactagactggtttagtcttctggcctccgtctttctcccatgctggatgcttcctgccctcaaacactggactccaagttcttaagctttaagacttggactggcttcctttctcctcagcttgcagatggcctattgtgggacctcacccttgtgactgtgtgagtcaacacaccttaataaactctcctctctatatacatctatcctattagttctgtccctctagagaaccctgactaatatgctgtcctaacacatcatgtgctgattattcctcgttttaaaaaattggagaacaaaatgatcagatgctgatcttcattttgaaaacctcttttgaatgtgctgcctccctggtatgatctggatgcttgccagggtggtctggagacctcagtctgtttgctctcccgggaaaaatcatggtcacccactgacttcctcttttctcacaaatagaggacaaggtagttcttctgttgtaggtttcatcgggaatttattaatccccctcccggaggtgttagcatttcagtcttgtgcccagccatcttgcagtattgagagtggaatacagggtaagtcatatcctcaacagtccttgccaagaacaccaaaatcttagcctgtgggtaataatctaagtcttcttaatctaagtcaaaattaccctttccatctaaacataataccagcctctctaaaaaagggcaagctgacccggtgtggtggctcacgcctgtaatcccagcacttcggaaggccgaggtgggcagatcacctgaggccaggagttcaagaccagcctggccaatatggtgaaaccctgtctctactgaaaatacaaaaaattagacaggcatggtggcaggcgcctgtaatcccagctactcaggaggctgaggcaagagaattgcttgaacctggaggtggaggttgcagtaagccaagatcatgccactgcactccagcctgggaacaggagcgaaactccgtctcatagaagaaaaaaaaagcaagttttgtcccatcaggggctgacgcagacacagggaccaaagcccagccacctcctgggactctctgctgtcaaacaggaaggtacagatctttctccacccatgctctgtgatgccaaactctattataaaacatttactggagaagggtatcaaacgggaatttatttctatcacaaacagcactcaaatatttcccagatagtttctgcaatcagtcatgtgcaccttttcaaagttttaaatgtttccaaactttttggaaatgtatagtgattgatacaggcctttaagtttagtattactgctcatgccacattttcacctgatttccagtcttttgtggtattcttgattggtaagtcatttgattttatcttttattaagggcctttgaatttagcacaatgctgaaatgattcatcaatcataataaaagacttcaaagggatccaagctaaacttcaggattctgaggagcatactggacagtgaacttattgtatttcaacttcaggacaataagcctggtggaggattttgctctaaagacataatgagtatgttagtcacatctaaaaatcatctgctgtccgcatgttcagattcatatatatgtgtatatatataaatataatatacacacatatgtgtgtgtgcatttcatctgacattcatttattctgtagcaagatatgttttaggctattcttttctactgatccattccctgagcatcagaggtcactgtaaatgaaaaacaaggtgaactcccttgggtgggagccatgcttggccaaatccagagaaactgtgtggtgcttaattccagcttagtctacataggccctagtttgaaacataaagttgaaatccatcaagcaattgttttcaaatcaacatttcggaaacatttttcagtcatacttacatgaattcaaaatgttttcaaagtattgagtgttttgctgtattacatttgtaaaaaggcaaaagataatcagtgtgtgttgataatgttaatagagattttagaaatgatgatagtgaagtttaaaaaaggaacaccaaccaaacataaagaactctcttttcaaaatatcaatttaaaatacaggatctcccatggcttacaatggactcagtagtgaggcacacaaacagcagtaaaacacatctctaaggcatccagaagaaaatagataactaaatatccataatgctggccagactgtgatacatagcaaaatagaagtatttattctgtagcaagagatggaggctgcaaaggaaaatgcactctgttctcactaggggaatctggaggctctatacatggtagttttaattttttttttttttaaacaccaggctggagtgcagcggtgctatcatggctcactgcagcctcgacctccagggctcaaacgattctgtcatctcagcctcccaagtagctgagattacaggcgcccaccaccacacctggttagtttttgtattttagcagagttggggttttgccatgctgcccaggctggtctccaactcctgggctcaggtgacccatccatatttgattgtatcttttattgagggcctttgaattcagcacaatgctgaaatgactcatcaatcataaaaaaagactttaaagggaaccaaggtaaacttcaggattctgaagagcatatgggacagtttcttgtattagactccatctccagcctcccgaagtgttgggattacaggcatgagccaccatgcctggccggtagttccatttaaattagctcataaaaggtaggtaagatttcaacaaccagggaagaagacctcagtcaagaacaatatggccatagactaaaggcgtgagactggatggcacagctctgaggcagggtgtctggggactgagagcacctgttgctaaggtgataaattaagatcagattgtaaatagctccaaatgccatgctaaagtgaacatttctctgcaggacacgggtccggagaaggttttgaacaaagcactttagacagatgaatctgagggtaaccctaaagacaacatggaagctggagaaagaggaggaaagattctctaagagataaatgcactggcttacacaaaaagcaggtgggcttacacctggaaggtaatgatggaaacaaaaaagaataaccaaaattcagtagtatgtcaatatctggtaactgacaccatctggaatgaggggaaatgattcaagactttccaactgggacaggtggagagagaggggtgtaatctaggaagatggaaaatgcaagagcaaatcagattctgaaaacaattaagtaattcctgattcctttcaaataaaaggtgaggcctgatgtgagtcttaaagtcttaaagttcactggttaaagggaaaacagtgggggagggaagcacagtccagcaggatgcaaacaggtgagcaaagccacaggttagaacatggaagctgtcgaggaaggcaagaaaaggggaaggaggcataaagctgggccacgtgccaggaccagtgagagggtgaccatgaaaaatcagtaacaagatcggtgaccacttagacgtagaggatagaggtgtgggggcagggtggactgagaaagtctctcaggtttcaagcttaagtgactccagggcttttgtgcccacatttaaaacggagaatagatgtgaacaatcaaggaaaaatgactgatgctgagtttaaggcacctgggagacgggggataattgcttcccagagacagaggtgcagcgccaaacctggggaaaggaagacccagtttaaagataaaagggttgttaccctttagacagcaaataaaaacacgtgtgtagctggtatcactttgaaaagggaagaaggaaagcccacagatctctctacagacaagacaaccaacgactaaaaaccatttagattaaaagaaaagaaataatcttacagtaatgttgtaaagaggtattaacatcaaaagactaactagaactaacatcaacagcagaaaggacaatttatagccttattcattagcatgctgcttactgttccactgacaattttaaccaccgggttaagcaaaatctttgccttccttttttttgctttttgagacggagtctcactatgtcacccaggctggagggcagtggcacgatctcggctcacaaccacccgggttcgagcaattctcctgcctcagcctcccgagtagctgggattacaggtgtgcaccaccacacccagctaatttttgtatttttagtagagacgaggtttcaccatgttggccaggctgatctcgaactcctgacctcaggtgatccacctgccttggcttcgcaaagtgctgggattacaggtgtgagccaccatgcccacccaatctttgcctttcattaaagtcatgaatttcctgccatcaatggaaatgtcttttgatgaccacatggatatcaggagcgatgcatcctgctttctgtccccatgttccagtgcaatcaatgttttacacatcaaacattccagtggagaatggaactcgtagaacaaattagaaaatattcatctaatgatctatccaaagataaggaaggtcttgatactacaattctgttaaattctgttaaataaagtttaagagtgtaggtgtcctttattaacaaaatccttacctttggaaaatggtctcttttttttacagagctggtgaaacacaccaggctaacttcttgtcaccaggattcatccataaaacttttgtgggttcccactgagcagcccttggagccccctcttgagactctcataaatgtagaaagtgttctcattgttcaaatcccacttacaagtgagaacatgcagtgtttggttttctgttcttgtgttagtttgccaaggatgacatatataccatggaatactatgatagtccatagtccctgcaaagcacatgatctcattccttcttatggctgcacagtattccatgtgtatatgtaccacattttctttatccagtctatcactaatgggcatttgggttggttccatgtctttgctattacgaatagtgctgcaatgagagcatcaggacaaatagctaatgcatgtggggcttataacctaggtgacacgttgataggcacagcaaaccacgatggcacacatatacctatgtaacaaacctgcacgttctgcacatgtaccccagaacttaaagtaaaataagagaaggaaaatggtaaaaggaaaaaaaaaaaaaaaaagaggctgggcgtagtggctcatgcctgtaatcccagcactttggaaggccaaggcaggcagatcatgaggtgaggagttcaagaccagcctggccaatatggtgaaagcccgtctctactaaaaatacaaaaattagccaggcatggtggtgcatgcctgtaatcccagctgctcgggaggctgaggcagaagaatcacttgaacccaagaggcagaggttgcagtgagccaagaccgtgccattgcactccagcctgggcaacagagcgagactccacctctaaaaagaaaaaaagaaaaaaaagaaagtgaatgacactagcttacatgggtgctctctgaggagccaaaaccacatttagcagaagcctgagaaatgcagcacctcagtcaactccaagaagcaccgcagcccagcaagatctgccaggagctctccctcctgaagctccacgcaacaatgcacagctagaaacttttggtcttcagttatcaaatggagcaaccagtgtaaccaaagtcaaataacttcatgggcatgctaaccacccttcgtgaaagacacgcccaatggtccagaccagtcacactgatggggctcaaaggcaggcaagagtcccagcctggatgaacccttcacactgagcgagagcggtacactcacggcttcccaccccgagttttctacctcctctctctctctctctctgcctgctgccccccaactcctcaacccacccgggtccccggggaggctgtgtccttctttcatttcttgtgtcaggtttcgggctgacacgtggtaattgattccgtggctggttagacgggcgttaagtgggagggatgaagtttcactgaaaacaaatagcacttcatgggtctgacctttcctcttggaagcttttgttgtggtcgactctaggctgtgcagttcaaacctgtgtgagcaagttgtgtctatgtcggcagttccccaattcaccttcaccagctcccagtgtgcagtgacagctagattgtctcactgtcacttctggcatgatgacagcctagcgtcaggtggaggcaatgattcacacctgagaattagtgtcccagggactgagatggctgagtatggcctgagccttcagaatagcaggacttcatggaagagacttgcattcagagaaaaacaaacaatcccatcaaaaagtgggctagggacgtgaatagacaattctcaaaagaagatgtacaaatggccaacaagcatatgaaaaaatgctcaacatcactaatgatcagggaaatgcaaatcaaaaccacaatgcaataccaccttattcctgcaagaatggccataatcaaaaaatcaaaaaataatagatgttggcgaggatgcagtgaaaagggaacacttttacactgttggtgagaatgtaaactagtacaaccactatggaaaacagtgtagagattccttaaagaactaaaagtagatctactgtttgatccagcaatcccactactaggtatctacccagaggaaaataagtcattatacgaaaaggatacctgcacatgcatgtttatagcagcacaattgcaattgcaaaaatatggaaccacctaaatgcccatcagtcaatgagtggataaagaaaatgtaatgtgtatatacatatatatatatgtgtgtgtgtgtgtgtgtgtgtgtgtatatgtgggtatacatatatatgtgtgtgtgtatacatatatatgagatggaatgctactcagccataaaaaggaaaaaaataatgacatttgcagcaacctggatggaactggagactattatcctaagtgaagtaactcaggaatggaaaaccaaacatcatatgtcctcactgatgtgtgggagctaagctatggggatgcaaaggcataagaatgatacattaaactttgtgaacttgggggaaaggatgaggggtggcaagagataaaacagtacacattgggtacagtgtacactgctcaggtgatgggtgcagcagaatctcagaaatcactgctaaagaacttattcatgtaaccaaacaccacctgttccccaaaaacctattgaaataaaacataaaaaatatttttaaaaaaaggacttgcattcaataaataggatggataaatcttggataatacactttgtccaagtgcaacttccagtttatggcacaatttcagttccagtcacccaaaggaggcatcagcactaagctttacccacgtgaagttcaaggttcccccaatgaaacctttgggttacagtcatgcgtgttctctgcattccccacatcctccttcagaactaaaggatgcctttccccagggcttagagggatgtcagtggcagctttcagctatcctctgcagatgctgcctttggctgaagggagccaccttacccaggattacaccctcttcctgtgacagccagtgtccaatgagcaacagaccaggagcacaatggtctgagcctccagccccagctcagcgtgactctgaaggccacgccagcttcccataggatgacagtggcactatcaaattcttatctgtcacctcctgtttccttttctccttgatcacaggagtggccccaaacaaacttccagcagtccagtatcccccagggatctgcctcctggaaatccaggctaggattttggagccatatcgcccactccctagccagcaatgaggaccccatcacatagcccctcactcaaagtagcagtggacactttgggaggccaaggtgagaggatcactagaggccaggagttcaaaaccagcctgagcaacatagtgacatgccatctctaaaaaaaactttaaaattagccacatgtggtggcacatgtctgtagtcccaactacttgggaggctgaggcagggggatcgcttgagcccagtagttcaaggctgtagtaaactgtgattgtgccactgcactccagactgggtgagactttgtctctaaaataaataaaattaaataaaaaagtaacaatggaattgttaagactttcaccagagtgaactgggggagggttaccagggacaggaaatgcaggagcctgtgctgagctgagcatcagctgtttgagaaatacacacaggaaagaggagtgataaagtcaatgagattgcctggctgttgctgaggacaaatgacgtttgggggactgacaagaaaaggctgaggacactgaccatgaattaaaggctatgagtgaaagccaggggcctcctggccaggatgtgaagggactctgttactcatactcaagaggcagaaaaagctaaggatggggcttagaatttagttacaaaaacagcagagtgtcacagaattttaacccccaactagacaagtctgctatggccaaaatcagagctcccactgggaaggaatgatatcttgatataggggaccttgaatccctggaacccctgaactctctgaggctccagaacaggctcacccaggggagggctcgcacctccctcttgctggaagacactctgcagagacctctgcctataagatagcacatacccaggatctatcccctcttcctcttctacctctgcccacaagacattatacacccaagatcaacctcctcttcctcttctggcccccaggctaatgtcaagaggatagaccctgaaggatctgcaagtcccgcaaatgtgctggtgggagccaggagagggtggcgggactcggtcctcagggctctaggtcaagggggtagaacacaaagtcagataaggaagagtttattaacactggaacattctctcatgatataggatgtaatacctgcattcatctgctagggctgccgcaacaaagtaccacaaactatgggcttaaaacaacagatatttattgtctcatggtcctggaagctagatgtctgagataaaggttattagtcaaggttctccagagaaataaaaccaagagagatagacagacagatagatagataatatatagatagttgataaataataggttagatagatagatgatagataataaacagatgacagttaagtagagagataatagagataataaatagatgataaatagataacagatcatagataatagagatagattagatagataatatagacagaatagataataggtaagtagataaatagagatgatagatgatagataaatagataacagatgatagataatagagacatattagacagatagacaatagagagagagagagaataaatgaagacatttatttgggggaaagctcacatgattatggaggctgagaagtcccacaatctgctgtctgcaagctggagaccaggacagttgttggtgtaactcagtccaaatccaaaggtctgagaatcagggtatgtgctggtgtaagtccccaagttcaaaggattgagatccagtaggtttgatgtccaaggtcaggagaagatggatgtcccagctcaagaagagggagagaattctcccttcttctggccttttgttctactcaggccctcagtgccttcccagtgggatgctgcctggtcaccactgacggcagatctttcttactcagtctcctgattcaaatgctgatctcttccagaaacaccctcacaggcacacccagaaataacattaccagatatctggacatccctcagcccaggtcaactggcacatacaactaaccatcacagaaggcagcagggttggtgttttcttttttgtttgtttgtttttgagagggagtctcactctatcgtccaggtggagtgcactggcgcaatttcggctcactgcaacccctcctctgaggttcaagtgattctgcctcagcctcccaagtagctgggattacagtcatgtaccaccacgcccagctaatttttgtatttttagtagagatggggtttcagcctgttggccaggctggtctctgatctcgaactcctgacctcagatgatccgcccacctcagcctcccaaagtgctgggattacaggcgtgagccaccgcacccggacagggttggtgttttctgaggcctctctctctggcttagaggtggccatcttctccctgtgtcctcacatggtcatcccccattccccggtaactgtgtccaaattttttcttcttataaggacaccagtcattggattgcgaccctcttatatgacttcatttaaccttaagtacctctttaaagacctatctccaaatatagtgacactctgagctactgaaggttaggacttcaacatataaatggaggctaggggtgtagagaggatacaatatctcaacaaaaattatgagatggtatcagcatgatgctgggatagttcttggaagccaggagcaagcaatagccatattaagtgaagcaggaatgccagaattatcatggcagatgcgggggaaaagtcaaaacacccagagtggacagctatagtgggtacacctcttaaggccagaaaatgtaccagaggctgttctgtgggagggtccagcgggtatgtcacttaccaaagtacaaagaagtgtgccaataagaggtgccagcattactgaaaacctcagtggttgccattctctgtgggccaggaatgatggtaggagacatctaacaatggggatgacaggatctccaaatatcagaaaccaggcaactatgcacagctatcagaagccagacagacaataatcccgagggtcaaggtcagagtgctaccctctgcaagtcatctggcatagttaagaaaagattgttagagaatagcatcccttagaggccaggcagagctgcaacccaagtatcactcaatctacagcatcagaagaattcacgtttggtggtcaggaagctgaagacaactggcccaataataaaccagggctctcagcctagtttccagatctgaaggaatttcagacccagaatggttgacactgatacacagagacttgaagcaccctcatggcctccctattatatgcctttgcctcccaggtagtaagtaacaaccagaaccagttctggttcatagtagggcactggggcactgcctagtggagctgtgagaagagggtcaccatcctccagaccccagaatggtagatccaccaacagcttgcaccatgcgcctggaaaagcagcggacactcaacaccagcccatgaaagtagccggaagggaggctgtaccctgcaaagccacaggggcagagctgcccaagaccacaggaacccacctcttgcatcagtgtgacctggttgtgagacatggagtcaaaggaaatcattttggagctttaagatttgactgtcctgctggatttcagacttgcatggggcccagagccccttggttttggctaatttctcccatttggaatggctgtatttccccaatgcctgtacccccattgtatctagggagtaactaacttacttttgattttacaggctcataggcagaagggacttgccttatctcagaagagactttggacttggacttttgggttaatgcaggaatgagttaagactttgggggactgttgggaaggcatgattggttttaaaatgtgaggacatgagatttgggaggggccggggcagaatgacatggtttggttctgtgtccccacccaaatctcaccttgaattgcaataatccccatgtatcaagggcaagaccaggtggagataattgaatcatggaggtggttacccctatactgttctcatgatagtgagtgagttctcacgagatctgatggttttacaagcgtctggcatttcccctgctggcacttcttctcttgcttgccaccacataagacgtgcctttcaccttccaccatgattgtgaggcctccccagccacgtggaactgtgagtacattaaacttctttttctttataaattacccagactcaggtatgtctttatcagtagcatgaaaacagactaatagagggtgtttgcaattctccacctccacagatttcttggtgtgtgagataagagctatcagtgagaaaggacaagggagagtttctaaaactgtccaccccagccaaaacagtaaatcaaaaataacagcacattctggggtaggggttaggggaggtttggatcttaaagcttagaactatccttaaagaccttaagggtgcaggggtatgtcccctctcatatcaccatttaattaatttggtccctgcagaaaccagacaggtcctggaggatgacagactcctgtaaactcaaacaagtagcagcccacagctggctctgaagcttccttgccatatgttgtatcttcactaaagcacaggccccaggtacatgctgtgcagcctttgatctggggactgtgttcttttcatctctatcagaaaggaggatcagaaacagttcacagtcactcagaacacacaacagtattcacttagagcactgacccagggctatattaactctccctaccatgtcatcatattgtctgaggacacctgggccacttggacctctgcagaacatcatcgtggtgatgacacttgtaaaccagacccaatgaacaagaagtggcaagtgtgctgggacctttgtaagtcagactcataaaataaataaagaggcaggaaaagttctatgaagcttcaggggcctgccacattagtacacttttaaaagtccaggatctgcagcatgccaggataacttggccaaagtaaagaataaattctacattttactcccctaaaacaaagaatgtaacacaacactctttggattctggaaatattaattccacaattgggaatattgatcacacccacatggcaagggacccaaaaggctgccagttttgaataggaaccaaaacagcaaaaggtccaggctgcaaggcgactggccccacagcttggccaaaggacccagcagttgctaaggcattagaggtagtggtgacggaaaaagataccctgtcgtgtctggcaatccacattggcaaatcacaactcagacacttaagagttctagagcaacactgtgccaactatagcaagaacgatataactttggaaagaacagctcctagcatgctgttgggccctggaagacatggcatatctgaccacgggacaccaagtatcagccattcatgatgagccaggtcctgtcacacccacaaagccacacagctgggcaagtgcagcagtaattgatggaaagatggaaacggtatatcctcatcaagggcatagcaagctatgcaagcaggtagctcagaccccatattattcatcattattgcatcagtgcctctcttgagctcacacctatggccacatgggaggtcccttatgaccagcccatggaggaggaaaatacccaagattaaatcagtaagtcagagtatcattgacccataagtcagctgagtttgaggatacaagccaaaaatagccagtgaccgcagtactgcctcattcaggagctggccttgaatgacagtggagagaagaaatccaggggacagagctttggactatgcacactacatactgaaggggaattggaaattgctagtatgtaaatattattagcttcacacactttgattgaacttgggtagacaacaatatccccaaatctagctgagccttagaatcaactgagaagctgttgaagaatgtgcatacctaagccctaccccaaagtgactcaaatagatgctccaggtatagagctcagaaactgacatcttaaataagatccttaagtgattctgattttgctggtccttggactggtactaggaaacatttgtctaagcgattagcaatgccataacaaaaacaaaaacattaataataaacgcaaacacatataacattatgtgcttaatatatacttacctttaaattctcacaaccactccaggaggtatgtattattattaatcccattgcagatgagaaaattgaagttaagtgacttacccaaggttacagagtaagtgaatgacagagccagtgttttaaattagtcttactctagagtctttctgcttaaccataatgccatagtggaaaaggcagtcaataaaggagaagggagctgaaaaatctgtaatccaaaaagcacatacagtatatagggccaatttctgcatttacctaaaatgaagacaaagtgtttttccaaataatttaacttcaacagctgaatctgtttacaatagcatgtgagcaccacctagtggctctgtagggctgcttgaatagtaagtgctctctaagtacaatcagctcaacagaaaagttattaaaatttagtagatgcaagtttccaattccagaaagacaaattctatgacttcaaaaatgtttaaaaacatagtgagactatacaaattagggaaaagatcaaaacaggtgaagtcaaaaatagcaatagaactgattacatattaaggtttgttttttttagtgaaaatacaataaaacatgaaagacaaaaagccatatgcaaatcatttttaagtttaaattctgataatgaatttacttcaggtatacactaaaaacttttttttttttttttagatagggtctcgctctgttgcccaggctggagtctagtggcgcaatcttgattcactgcaacctctaaagtgattcttgtgcctcagcctcccgagtagctgggactgcagatgtgcaccaccatgcccagctaatttttttttttttttttttgtagagatggggtttcaccaagttgcccaggctggtctcaaactcccgggctaaagtaatccacctgccccagcctcccaaggtgctggtaaaaaccttttgactcatcaccttttctaggagtgatcctaattcagcatcttcttcctgcccaggcattaagacaccatctgctcctgcctctctcccaggagacctcaaagcaacctaacgagataaaaagggctggagatttacaggtccacttcctgtcttctcttcttctctgatgtctgtgaggttcattttctctcaagatctattgaatccaaatatacagagccaaggcagggcaacctcagtgacaggcagcatcagttctgagtacacaccatgggggccaatctgggaggtgagaagcaaaggctggaaagaaagtagcaaggtccaggagcaagagacgatgttgaggtcccaagaatctaattcagagccaacgccaggacacagcagagtgagaagacagagtgtggttccatgaacagagcctggcctccatagcctctggtgaggtgatctttccagggcctagaaagcatcagcatttcctgggttttttttgttttttttttttttgagacagggtctcactctgtctcccaggctggagtacagtggcgcagtctcagctcactacagcctctccctcctgagttcaagccattctactgcctcagcctctcaagtggctgggaccacagagacaccccaccatgtctggctaatttttgtatttttagtagagacagggttttgccatgttggccaggctggtcttgaactcctgatctcaggtgatccatctgcttctgcctcccaaagtgctgggattacaggcgtgagccactgcacccggccatcagcgtttcttaaaacgcctactcaaactgatatggtttggctgtgtccccacccaaatctcatcttgaattgtagctcccataatacccacgtgtggagggagggacttggtaggaagaaattgaatcatgggggcaggattttcctgctctgttcttgcagtagtgaaaaagtctcacgagatttgacagttttataaagggcagttcttatgagatctgatggttttataaagggcagttcccctgcacacgctctcttgcctgccaccatgtaagaagtccctttgcccttccttcgtcttccaccatgcttgtgaggcctccccagccctgtgaaactgagtctattaaacctctttctctttataaattacccagtctcgggtatttcttcatagcagtatgaagatgggctaatatatcagcattaagcagaagaaaagctcttccgcaggatttacatgtggatgaacctcgaaaacacgacgctaagtgaaagaagttggatacaaaaagctacacgttgtatggttccatttgtatgagctattcataaatccacaaagacagaaaacagactggtgcctgtagaagctgagggggaggagggaatggggagaaattgcttgatgggtctggggctttactttggagtgatggaaatgtttcaaactagacagaagtgttggccatacaacattgtgaatgcaaccaatgccactagtttgttcattttaagatggttaattgtatgttatttgaatttcaccttaataaatatgtgtgtgtgtgtgtgtgtgtgtgtgtgtgtgtgtgtgtgtgtgtgtgtgtgtgtacacttccttctgtggccaatgtcagaaatatcacaaatacaaaattccatcttttgtcttaggattttagaccaggatattttgaagtttgaatactgtgatggttgactttgagtgtcaacccctcttctgctgaaaaggaaacccacgtggtttggcatttgactagaataactgggctgccccagctgtgtctgtaaggtgtttccagaggagactggcatttgagtccacggactgagagggaagacccccttggtgtggtgggcaccatctgatcagctggggactctgacagaacgggaggcagaggaagggcaaatttgagctttcttccaaagccaggacatccttcttctcccacccatggacatcacaactgcaggttccccagccttaggactctaggactcgcaccagtgtcccccagtctcttaggccttcatcctggaattgagagttacaacattggcttccttgcttctgagaccaaggaacttgaactgagccatgtcactggcttgcctggttccccagcttgcagatggcctatcatgggactctgtaacctccatgatcaagtgagccaattcccctaataaatcccctcttatatctctctatggacagataggtagatagataattgatatatattagatagatagataatgataggataaataagataggcagataggcagacagatagaatagatagataaattgatagatggatggatatgtagacggatggatggatggatggctggatagatgcaccacagccagctgtgggctgctacttgtttgagttggcaggagtctatcatcctccaggatctgtctggtttctcccgggaccaaattaattaaatggtgatatgagaggggccatattcctgtatcctataggtctttaaggatcgttctaagcttcaagatccaaaagatagattgatggagagagagagagagagagagatgaatggatggataaagacagatcagatagatagatagatagatagatagatagatagatagatccatccatcttctagagaactctgactaaaaccaatacttgtgagaatcctgtataaaatgtagctagtgatcttggacaaccctctaaagtaagaaggtcatgagccttctctgcaaacaggttttgacagtgagaagggaaagaaaatagtgacacctggactcctgggaaggaaaagaaaattcgtttttagcaatgaggttgctaaaagaagcaactagaaaacaagctactccaacttcagatctttgcttggtaaagcctctactttcaggtgagtggggtgagttttctgatgagaatcaagaaggccggcctctctctctgggaagctcccagcttcatggtcctgtggcagaagaaacccaagtctggaagaatccagggcctcatctgagcctttctctccagcattagaaggaaatccacaattggctgacaagcccgcattccaaacacacacccagttaatgaaaaccacacacacacaaacgagagataggttctacctgcctgtgacaatctggagtaggaaaagcacatgaaaaatagccttgggactttattctgaatactctgcacctaaggaggaattgagtttctcaaaaataaaggctttctgtttacaaacatgctgtttttgccaaagagaattctttattttaggtgctttgggaaaactgcagagtcctcgggtttgtggccaaagacgcccaaatgttgcaatcctaaacctttggcagcgacaaaaacatgttggcaagtggaaagttttcagcatggggcttttcatgttgttttgtttgggtgtgtgtttgtttatttgcttggtgccaaagggtttcctccacatcttcccagaaccagagagcatgttggcgctccacttgggatgttggccccaaaccacctgcactcctattgtacatcctgtatggtttcaggcccccaaaaacagcctttgagctcagggagacacctctttcccacctccaaaccctaagtgaagcctcggacaatgagaggggatgacatgaagcatttggcctccatggctgtggacttcatgagggctgagggcatttctgaatttcagtctctgatcaacccacagttctgttgttccctctgtctcgccctagcaggcctcatttctatctctttccatctccccggctgctacctgtgctgcggtagccacttgatacatgaactatggcttcccgcccgttaaaactagacattcaaagaccagcccagcagaatgtgggcacaaagagcatggaattcccagatagatctttacattgtaacagagcagggatgatcatcttgaaaatcaaggcttttgattaacaagacttgggtattttgtaactcaggaggctaagccttgccctgggatctaaagttctagccctgagagaatagaggagggtccaagtgccccgcccagaccctgaacaggccaaaaagggaggaaatgctggggagaggacctaagctggatgcaggaccaagagggtcagcatggagagagccagtcagcgctcaaccctgtctgtcaccacctgcagatggggagctgagagggaacagaacttgcacccccattcagtcctgtggatggtccaggtagccaagatggccccttgagctcagagctgttggagtctcgcctgctaacagtgctgcatgaggcccatccaccactatgtgtgtgtgtcccatcagcacctcacactcaggaaacccacaactgagggccactgcctctctccccttctcccccacctccccctactccaacccaggcccccttcctaactggcttttcatgagagctgcaccttttgagtcatcgaagattctttgcatcggctttgcagtctctgtcccctctgaggctcactgatggtcagatgctgagcctggcaccttttccatccaccaatggtgccactgcctggctcaagtatctaattttatgtctgtaaatgaaaacaatttaacattcccctaattgatacctcaccctcagtctccccacacgaaacctcataacctcctctccttgtttctactctggctcctgtttctgtctgctcgccttttccctctctagttttcctccttctttcccattttcatatgtgtcgccagccccatgtagtgccagacaggctacattttttcagtgtctcaaatgcaagggtgatagtctcactccttcaagccttcacagatgttgttctctctgcctagaacacgttaacccctttctcccttttctccttctcatctttcagatgtcctgggtgccactccctccaggaaggccatcatgctttcaccaatgggtagcagaagcactgattcccatgggctgaaactataaggaaacatattcatgtcatttaacaggagcccagaggcagtgtgggcatcagtggtgctgcaccatcgtcaaggaccctgtctctttccctcgtttgtcatccccagtgctggcttcatcttcaagctgtagtaagatgtctgccccagttctagacaccacattcagacactatgctatctggagggtgaagggagtttctctttctgtacctgccgtcaggcatgagaagacatttccaagtcaacgcctctttcctccccctaaccagaactacctttacatttcattggccaaaatttagttcacatgtgtgtcactccgccaaccactggtgaggggagtggcaataatcttttgaataattcgctgttgggccacctctcaggctaagtgagctcagctttccccaaggcgctggctgtgctgaaagcgtggggacttgatcaaaacccagattctggctcacacctggaatcccagtgctttgggagggtgaggtgagaggatcgcttgaggccaggagtttgagagcagcctgggcaacatagcaagactctacctctacaaaaaaaaaatgctttttaaataacgcagattatatttggaaagaagtggaaggcaacaggccatcccgcagcatttgctctcctttgcatttggctctaagttcctttcggagtctcctcttcctcctgcatactctaacctgaaggtgagagtgcaccgcccccacccctgccccctgcctggccccttctccccatcacctcttcacactgaaactccatctcttaaagcccaaccttgaaggccaattccaaaatgagccttttctgatccttccacccacacatactcatcctgagtatgtagaatgatgctctccaatgaaaccaccaagcaccctttcccactgttttctgaatatcgggctcctttggaagttccttaacagccaagctgatgtgactgacagctgcacttccatttgcacatggcccccaattcgcacatgttgggcgttgtgatggctaatattgagtgtcaacttaatgggattgaaacatgcaaagtattgttcctgggggtgtctgtgaaggtgtttgccaaaggagattaacatttgaatcagtggactgggaaagacagacccaccctcaatgtgagtgggtgtgatctaatcagctgccagcgcggccagaataaaagcaggcagaagaacatggaaagactagactggctaagtcttctggcctctatctttctcctgtgctggatgcttcctgccatcaaacatcagactccaagttcttcagctctgggaactggactggcttcctttctccttggcttgctgatggcctattgtgggacctcacctggtgatcatgagagtcaatactctttaataaactcccctttatatctatcctattaattctgtccctccctccaaagaaccctgactactacaggtgtgctataaatggttgtgagtgggtgggcagagcactgagctcagagtccacagccaagcatttagcctgcgctcagctgtgcacctactgtgtgtatgtgggcaagtcaccaggcttctcaaacataaaataaggctcttagatcggatttctctgagacccttgacaattccgtgtttgttacttagggctgctgctgcaacaaattaccacaaactgggcaacttaaaacaccagaaatctatcctctcccccattccaaaggccagaagtcaggtgtcagcagatgtggtacctcctggaggctctgagtgagaatgtgctccatgctctctcctggcttctgggggcagctggcagcccttggcattcagggcttggagatgcatcactctatgccctgcctccattttttacattgcctactctgctgtgtgtctctgggtctcaaatctccttctcatttctcttatagggacaccagtcgttggatttagggctcaccctaaatccaggatgatttcatcctgtgatctttaatttgctgttatctgcaaagacactatttccaaataaaggcacattcacaggtaccaggtcttaggccttcaacgtatcttttggggaaacataattctacccaatataagctgtagacgtctatcagttactcaagcctggctagatatcatacagaagacacaactaaggactactcaaggctgaaatgtttccttttttttttttttttgagacagagtcttgctcggtcacccaggctggagtacagtggcatgatcactgcaacctccgcctcccaggttcaagcaattctcctgcctccgcctcccaaatagctggaactacaggcatgcaccatcacacctggccaatttttttttttttttttttttttttttttttgtatttttagtagagacaggtttcaccaagttggccagactggtcttgaactcctgacctcaggtgatccgcccgctttggtctcctaaagtgctgggattacgggcatgagccaccgtgcccgtttctttttcttttcttttttttttttttaattacctgtagatccatttgtggattattcaactacccttaacttgaaagttgagtgatctttttaacgtttttctcttttcatttcttaaaatactggcagtgagtcagtctccaaatttcagatactgatattgaacactaccctccatgctaccagatcatttattttggtttctgttactgattcccggcctccaagtccccagaagcacagccacagcggccgtgtatgggtcccagctgccttttcactcctcgatgccttaagtcctgacgatgaaggcaaggacccttagaagaatcacacggaggcctccatgtttcctgagctctgtttagaaagaatcaaatcagtctcatataggccacaaggagaccagcagtaccatgtaacctcagacatgacacaaagtgtccccagcacatcccacgcaagcattattttttaaatgcatttgcagtagggaaaagtatttctgatacttctatacctagttgtaccaaataatgcatttgtgcagttgatggatgaggtgaacaaaagcaatccttttgcttccttgacgaatgtagttctgcaggcttcatggctggcaaaaccaatcctatagaacccaatgcttggagacagagctccaccaggaaacaaggccaagctgtgtgctgctcttacgttatgtctattttagaagttgactttggcagaggtgttgaccactgacacaatctatctacttccagaaaagataagcggggagggaatcaaacaaggaattgtctttaaattctcacttggaaacagacgccttggcttgaaaaggggagtagaatactagcttcaatgatgatgaacaagttggaacaaattataaagaaaatattgaagctataaataatttatttttaaagaacctgtgtgctaaaatatctcctgactaggaaattctaaagaatgtaaatctccagattatagtctatctgaggcaatgtttttccagaactattggaatgtgtctacataacaaactcaataatcttttgaagagttcactgttaagaggactcctaggacacgaggagcaacgggatgatcacacactcatggttgtaccttcaagtaaagaaaaatgagaactttaaatcacccaagatgaggaagctctgtagccagactgctctcattcaaatcaccaggaatgtttcaatctgatgccagctttctcccttacaacagtgaatggataaaaaggggaaaactcaaaagggatattcacagcgccttctagttcccacctcagtcctatctcaaaatacctgaaaattctgccacagccctttttcctttactctagaacgaaatgacaaaattaaactttataaaagtttatgaaacgaaacctcacaaaacctgttactgaggttcaacgatatatttttaaactaataatgtgaatttttccatgctgaagagtcatgtaattgggtcaccaaataaaaaaagacacagctgtaatagaaaccattttaggggggaagaaagtcctgactaatcacgaagtgatgcaaatgcaaaaggaaatacttagactgtatttttacccagctgagtagtcagatgtttggaaatgccctggatttttcgaaatatttccagctgttaatagcaaaacggctcagatgcttcagaaagaaagaacacacactgaaaccttttttttttttcctgtgtacttttcttaattacagctgctcccttccaactgcaagaggggatctaagtgtaaagatgttaaagcttagatgttcaccctgagctccacacggatttatttttatgaaaatgactgagaagtgcaagcctgggaatacgcagagaacttcaaaaaagagcctggaaaaagtaggaggtgataaaggagttagcacattttcagtttgtttctcttacaacctgtgagagaacccagacagctgatgggctcccggagaaaactcaggtagctgcactccagagagtttggtgaggccccagccagcaccagagacctgtggtgagctggcctccaggagaaggtggtgacagcggcagccgagttacatggcgccagatcccagaggacgagctctggcaaccgcctgtgcactcccctgcagccttttcttcagaagtgaagatgggggagtctggtcaaccacaggtgaggtggcaactcagagggaagcctgcacactgtcagctcagccaaccctaatgaggaccagacacccagaaatatttgcagactcagcaggggcgggagtgagaagtggagttggctggcctcaaaccaccaccagctgagcagggctcctcagccagggtgtgtcttctgggactcccggggcaaaaggtggcattagagatggaaattcaaaacaggctgggggctctggggccaggttttgtcctgggcgactgcttggcactttccccaaaacagcacacggaacctgtgaaaaatgtgctctggcccccttcaaccttgaccctgaggattgagggtgggaactgcggtgggtttgctcaaagtccttatcaccactcactggcatgtgttccctggctcagagcctgtccctaagaaatgggaagaaaatacacagctcccaaggagctgccagcagttccacaccaggaccctctgaggccagcctctctggggacggtgcatgctgaggagtccatgagaaggcttaactttctgaagatgtcacactcagctcttcttaggtaaagatttttttttttttttttttgagatagagtctcactctgtcgccaggctggagtgcagtggcacaatctctgcccactgcaacctccgcctcccaggttcaagcaattctcccacctcagcctcccaagtagctgggattacaggcatgcaccaccacgcccagctaatttttgtatttttaggagagacggggtttcaccatgttggccaggctgatctcaaactcctggcctcaagtgatccacgcgccttggccttccaaagtgctgggattacaggtgtgagccaccacgcctggccaagattacctttttagattgctaatctggccatctttgattagaagtgaggtcaatacataaaatgttccaatcaaattctgcaacataatttttcagtgttcttaaggaaaccctacccatgagcaaaatggcattaaggacaattggtcattcttttttatttattttgggaggagggggagaaatgaggggccttcattgttcccacttcaagaccagcccactggttacaaagcaggagaaaggcaggggcgctcccaggaacccagggccattgttatgggctgaattgctccctaccgccaccaaatccactgctgaaatcctaacccccaggacctcagaatgtgagcttatttggaaacagggttgttgccgatgtaataagttaagaggaggtcataccgacacaggtgagcccctaacccaacatgactggacttcttgtataaaagaatgctatgtgaaaagacaaacgcatagacagagagaaggtgatgtaaagacacagggaagaggtggccatctgcaaaccagggggtgccttcttgagaccaccagcttctaggagagaggcctggaacagactccccctcatgacccatagaaggaacccaccctactggcaccttgatcttggacttccagccccagaaccatgagacaataaatgcctgttgtttaagccactcagtctttggaacgttgtcccagcatccccaggaaactaaggtagccacatatgactttcatgggcccctggcacttttgtctttgtgggccccattctccgtaaaaaatatccagaatggctccacaactgtgttggtatagaggcaaataaaatctgggctggagcatgttcattttttcttctgattttagaagaaatgaaaacattttcatgggtctctaaaagtcccacaggaccttggctctgtgcctttcacacctcatggagaagtccaccctgtagaaagaatcactgaggtccccagattgggtcgggcacctccccggcctttctctattttggcaccacacgcaaattacctgttattgtgtctaacagctccctctccccacctctggctcacactccagcaaaaagacatgtctcatttatctttgcagccctggcacaccttaaatgctcaataaatagctgctgcaccaacttgaactgaacagatagagacctaagttactcaaggtcattagtgaaacatgaagcaagaaaagagcaaaagaaggaggttttggcaagaatggagctttaatagctggagcctcagctcctggtagcagagtgaggatctgggagctcggcccaggaaagtttctgaaactgcagtaaaacgagtgttttataaccacctattctgttccattttttttctctctctgtcttcatctttaaattttgtttttcacagtccagagctttgtggggtttattaatacttacatcagttatactttgcctttcttcaaatcagagtttctcaaattctgacttttccactgagattttctgacagtagatttggcctttctagacccaacctcacttacggttcatgacaagtttataactcgttctcatcttgggacaatttctacttttcctgctgaccatgcttcatctttgccatatctcagcatgaaaaaagttattttctccaccagaaactcacatgagtgaacaggaaacccttggttagcccttctgccaccacacaaaatttttaaaaagaaataaacagtcattcttctggacactggggagagataaacacaaaaacatacagtatgattgggaagataagacgtctacgtttctaatcatgtgtcataatcatgtgtcataaactttcagaagaacgttccacaaaaagcactcaatgggagactaatagtgtcacacaagtggaagattctaaggacataaatttgggaggtgcaggattaaaaaggcaaagacagtttctataatgcagaacttctcagatccttgaaagtgctaacatgctagatgaatctccatgaggcagatcaaatagcgggcacttcctagattgacttgaccacggaatcctcctacgggggagtggggtacggagagaggtgtgtggggagaggaatacatgttccaaaaataatctggaaaacactagactagcaatagatctgtcaagtttcaaagatgaacaccctattttcacaagaactttctggcataaggaccattcactgtgactattcgcatgaggaatattcactgtgggctgaagcccttggagagggtgtcttaatagtagtgtgattcgtattcaggctcaaaacacagccagatgggccttccttagtgagagaggagtgtgaggaggatgtattggctgggaaaatcacttcagcaagggaaaaaatttacaagctgtgtttgaagagcaccagaagactggtgtggaagggttaccattgatgaaaccagaaagaggaggagacatgggtgggaaggagtgttcgaacctgaccatgagtgagagtctcaccctgtgggatgcatgggaaacaaggactcaacctcaagggaaagcacaccccatgggtgctggaaaagcatcaccaaattaggctccaaaggataaaaatgctgcttcctgtctgcttggcgggagggaaggcggtgcccagtgagcaggggtgtggacctggcatctggtagagcaccacagcataggggcaagagccccaggcgcatcaggaaagtcacgttccacacccagtgctcccgtgacttccaataagcaatttaacctcccagggactcaatgccctcacctgtaaaataaaaggaaatgacaccctaaggttttcccactctaacaccctgtcggtccatgatgatgagaacttcccatctatccagcgccaggcagaggtacaggtaatgggcattttgaggccagacaccacattccattctctcactgtcagcttcacacagacggtgccgggcccacaaaccatctctcacacagatggggaaggcagccgtccccatctgggcagctgtgcagccaaatacagctgcctgtacaagggtgggggtctccttggcacccaagaggcacaaattctgaaaaaactaagggacagtatactggggagccagaggaatttcatggggtgtcctctccgcttttgaaatcaggcaagatcatggccatgctgtcttgaatcttaaacaacagaatcaatcaggtttatgtttccttagctacttcccgaactacagagaatcaattaacagttcctgaatctgtaaaattaagaaattagtgatagcttcatagagtttcagagtgaattgaacggcataggtgatacaaaacacgaaactccatgcccagcccagagtgacaagtcaatcaacattctgggctttgaggtctatacctgttgtgctcaaacctaatcatttcccagggtgcatcgctgatatgctgtgccctctgtctcccaccacctgccttgcatctaatgctgctccctgcgtctcagtgggacttggctgcagccactcagggttcctttattccagtgccaaaatggacatcaagaggactaagaaaatgtagtcccatttgggcatcttaaactcttaaacttacagctgacactataattttagctgaaatattggaaaatttttgtttcccattatcagcatgattcttacttactaagatgaaatatggtttcctttggttaaaaaaaaatacccaatatgttttaaaagatgaagtaatgcttagtaactttggttgttttttaaaaccccttcctattaactgctcaagggacaggttgtaatgttgatccacgccacagtgtatttgcttcacttcctgcttctggctgaccctttaacaggaaaattaatagggaacatgagtcaattaatcagaatgcatagttatttttatgaactctactgccagtgcattaattcatgacatgtgtttcaaaaattggaagaatggcaaaaatataggtatagattgcttatgatatatgattccaaaagtcagaaaccgtgagtcattcatccattcattcattcattcattcaggaagtgttcattaagtacctactaagagccagtcaccattccaagcattggaggtaatcgatgaatcaagtcaaagaggcacaacaggcatgaaacaaacccttacacattgatttatgatggagatgtggaaagggtgggatggcacacaaactaggggccacaccagaggtctggccaaggtttaagaggcaccgagttgcagccagaaggctgattagggactcccttgatggacagatggggagagaggacatagtgacagaaaggcactcaaggtagtagaaatttcctatgaaaatgctctatggctccagggagcagcgcgactgaaaatagtcagaatataaggtccacaggcagggggaaaatgagcaggagttagatggaggaacagccagaactcagaagacttgagtgccacacaaaggaggtgggcttcatcctcaggcagtgcagaatttctgaaggggcactgtggtcacacgtctaaaatgtcaccctggagacagtgaggttgatgggaagggcaagcctggtgggaaggagactcacttggaagctgctatcaaggttcaagagaggaacaatgagggtctggggtgagacagtggcaccagagagaaaaagcagagtgcatttcaggggtatttggtagcacgcctcagcagggtttgttcatggatagaggtggggtgagaagaaaggcctggggtggtcactggaggaaaggcagctccatcacaggacattatgttaagtgaaataagccagacacagaaagacaaacatcacatgttctcacttatttgcgggagctaaaaagtaaaacacctgaactcatggagatggggagtagaaggaaggctaggaagggtagtggggaggtcgaggggaagtggggatagttaatgggtacaaaaaataatgagaacaaatgagtaacacctagtatttgcaagccacaatggggtaaatacagtaaaaaaaaaaaattgtacattttaaaataactaaaagagtataattggatgatttgtaccctgatgtgattattacacattgcatgcctgtatcaaaatatctcatgtagtccataaatataggccacaaaaataaaaaaattaatttttaaaaaataaataagaaaaaagaggcaaatccaccaactcaagtataggagggaggacgagaaccagtgctggggaaagatcatgtgctccattcagccatgtggatttgaggggtccgtgtgccactcaaaaggcaggtgcttgacaagctgctgtgtatgtgggtctgaagctcaagaagtaagtctgggctggtgaaagacatttggaaatcatcactgctatcaccatggaaaacaagagaggtcatgcaactgattacccaggaggggccagtggaaaaagaggagtccaggaaagagataaggagcagcccaagaatgatgcagggagacagatgatgataaagagaaagagctttgcacatggaaagcaccagagtacagcatttacagaatgtgaagcttacattgctaaatgaagcaagaagagaggcaggatgatccctgaagcgtcagtgcttgcaaatttcaactctgatgagctcaacatatggcactgagcatccaccatgaacgaggagatgccagctcatctaaggcaccaggcacagtggctcatgcccataatcccagcactttgggaggctgaggtgggaagatcgcttgaggccaggagtttgagaccaggctgggtaacatggcaagaccctgtgtctgcaaaaaatttaaaaattatccaggtgtgatggcatgcacctgtaagtgctactcagaagtctaaagtgggagggtcctttgagcccaggagttcgaggctacagtgacctctgttgatgccactgcactcagcctaggcaacagagtgagacccatctcaaaagaaaaaaagagacagaagaaacccaacggctctcacacttgaatatgtgtcagaaatacctgaggggtttatttaagtacagattcgtgggcccacctcagagatttcaatacaatgggagaccccaggcacctgcacacttcacaagcacccaaggggttctctgaggacagttaggaaatccactcttagaaatactgtgaaagtgctgcccttatgtcaaaactagggacttttcttaaaagtatttctcagaagtccctagtatcagcttctcttccactcagaaaaatccaggagacttcaggattgatttcatcttccaagtgacttcaaccttgtagccttcagtgtcctcaaaatggaatcagcagttctcattgttagaagaacaacctgggtgtttaagaaaacatatctgcaattttctgcttccaccctgcctcctgaatcaggctcccagagacgaagcccagcaatccagaaatttctgaggtcttcccagtagattctatgtttcagccaggtttggaaacaactgaacagatcatctctaatccaatgtcaacccctaagagtccctgtattcaataagcacctgcaagaggaattgtgtttggactgccaaaataaggccctaataaacctccctgtcaaaaaggaagtttaagattccttgatgtcagcagagcctgcaagagaaactttagtccaactgtgagttttcagagtaaatattattacaatgatgtagaattttagctggcctgattaattatgcagtggcagcacttcaatgggttgtgggcctaatataagcactccattctgtcattgttactatcaagttcaacagcctcctcaaatcagtcagtgaggatttagcattgttgttacaacaacaagaggaacccagggaagaatgagtgctttcgtcagctctaaaatagcaaacttcagtaagcatatgtttaagtcagtgccaaacaacagattatctggctaataaggattattaagggaagtgagatgcctaatacggagcataaatgggactatcgttttaaaagtcccatttcatcagaggtaaaggtgacagatggttgcagatgtgcaggctgcgtcccctgcccttttcttctctcctgctgtgctgatctctacccagtgctagtaatggcctgtgtcctcagatcaggccttgctgaaaaagaaggggaatgcagaggcaggggacacatggcagatgttacttcctcttatgataatcccagggaggctacatggtagcacgcatcagcagggtttgctcacggatacaggtggagtgagaagaaaggcctggggtggtcactggaggaaaggcagctccttcggaggacatcatgttaagtgaaataagccaggcacagaaagataaatatcccatgttctcactcatttgtgggaactaaacattgattgaattcatgaagatggagagtagaaggatggttaccagaggctgggaagggcaatatggaggtcggggggaagtggggatggttaatggatacaaaaaggagttagaacaaatgagtaagacctagtatttgcaagcacaatagggtgaatagtcacaaataacttaattgtacatttttaaatagctaaaagtataattggattatttgtaacacaaagataaatccttgagggagtggatatcccatttaccctgatgtgattattacacattgcatgcctgtatcagaacagctcatgtaacccataaatacaggcacctacagcttcctacaaaacaggggagaattcctctgtttaaaaacctcagtaggattcccagtgcctacataataaaacccaaattgtttagaaaggtgagcaagagcattttccatccagcctttgctcctacccaccctttccttccctcactcccccacagccctacatacccaccattccaagaacagtcaacttccacttttcacaactcagggcctttctctgcatgttctgctgtctccagagcagcatgcttcctgctccctttcctcacctggcaaacctctcgggtcgggaggccgtcctggatgactctaaacagttgatccacccttggtgctctggagctttttaaaaactcctttaacattaaatactgtgctaaatgattatttatctaactacccatccaactcttccactggggcatgagttgctcaaggccaagcctatggtagattctcaaaaacatctgttggatggataggaagaaggaaggaagagagggaggaaagaaggaaggaagagagggaggaaagaaggagggagggaaagagggagggagggagggaaaagagagggagggaggaaggatagaaaaggcagaaaagggaaaggaaaggaaggaggagaaaggagacccggactggtgtcaggagactgatatttctccatctattcatacaacaagcgttcattggaagtaactattagttcaaggcaatgttctagtatactgagataaataagacacacctttgacccccacttaagagctcataaaccagcaaggaacaagttagataagcaagcagataattacattaaacattataaagtccaatagcggtacctgcaaggtgctatgatatcaaaaagaataatcagccacacagcccaggggaattgaattgaaagctgaatcctaaagcacaagtggaattgaaagcaatttacattttcagtagagggtcagggtgtgcaaaggcatgaaaataaaggaaaccctggacaaatttttaaaaaagaatgctgaaggtatgttagctagcaggtaggagaggcgaggctggggcgagaagcagggtgtggccatgaaggtgtttagaggaagtgtggacctgaatgtagccagagaggacgctctggctgaaacccaggcctttgcatgcaccatcccctcttggagcattctcaggctccccaccagcctgatcctgacatccttcagttagaggttccaggcaccctaccctttcccatcatgacactcatcaaaattcattaaacaattcttatatctggctgttccagcaaactggaagattcaccagggcaggcattgtatctgtcttgtttatcactgtatcctatacacctagaaagtacctgccctagagtgagccttccacagatattggttaaatgaatgcaataaatgcatgctcttcttggccaaaccttttcatcatggaatctgtgaaataatagagtcccacctgaggtggaaacaatcctggaagagagctgattctcagtcagcctctgacacccagacacgatgtgcttccagcaagacatgtcagctcaccaagccttggtttcttatctatcaaatggagctattggcctgaacgaactctaaggatgcctctaactcctaaagttgatgatttgtacctgatagtcgctccagatccatagtgttctatggagagcagttctttggtgatacgaagatgaaggaaagaactcagtgccactcacttccaggactgtgtcctcattgaatttgtcctgaggaaaacaggtgccaagttccatcttgactttattagatgtgaaaacatagtcagagatgaaaggaaaggtcacctctcctgggcaaataaactttctttcagtaagtccccaggagatggatgtggagagcccagggttttccactttgaagtttaaaattcccagaaagagacactatccctaaagccaaacccaggagacgggctcgaggtgcctccgaaggcaaaagccagtggtctgctccatgcccatgagattcaggggctagaaacaaatgaaagccatgattaaagtaatttcatctatgtgtttccagagactaattatatttattgcatctgacaccagtcagggacagcaaacatcttttgtgagccttacaacaaaagttgaaaagcattactcataatggctgattttgttttattacatctgactcaaagccaaaggtagacagcacttagagctctctgtggacattaatgtttgaatgcaatacagatagcttccctctctggcttcccaccagcacccacacatgctgccctcctgctctcagtatgtatgcaagtggttgtggaatagagaggcagtgaaatagctccagaatttgtcatgcagccaccatatcccaagcacattgctaggcactgatcctcataggtcgataaaacaagagaccctgccctctagggatgcactgggctggacaacagcccaccaacattaccctgtaagggcagtattatgtgccataacacagataacgtaagagtgggatgcgaaaatatcaagaaggaaagagtgagctctagttgggaaaaatcagaaaagggggtggcatatgaaataagccagcaaagaagaggttatgtattaggcagccacaaatgggaactaaattcttggtgccaaggacagcaagcaaggtgagaaaccgaggagggtagggcatgttcaactaaagcttaacatggcatgtgttcatatggggaaatagcacatggtggcacaggaacgacgaagcatgtggctgatggccttgaacactacctgaagagtgggcctctgtttgagagtaaggagcattcatgaccttgagcacaggagtaagctgcaaagagccacactctaagtaggttagtgcaggagtggtgtgaggtacccaggccggcagggcttttaagaaattgccttcaatggcctggttgagaaccactgctccagaacacagtcacgcctggtgctagggtctatagtattgcttcagtgctaccaaaatgaatatggtgggcttggtaagtgttaatctgctgccttaagaacctatcataggtccatagataaatgcagtttcaagccagtgccttataaacaacctttgaagacaacccatttgtgagttatatactgccttccaaatgatgaagatttgcttcatatctttaaggggtgtttccacttttaaagagaacttgcaatctattagaaaagatggcagaattttagacaaaggatccagaagctccatgcatgaaagtatttatgtctacctgctcccatgacataaggacaagaacataactcaccatggaggtccccactgctacacagcagcctgtctataagagccttgcacacacacacacaaagtggtatgtctttaaaatccataaaatcttcacagagttaattttactggaaaattgttctctctttttagaacattagtccctaaggacagactacagggagaaaacactgtttttataagcttgcctaagaaaattattacaccccaaagtccatcatggttatgaaattccattgcatccgtctcttgtttatttactttgaaaccaacattctaaatctacttgggatactcaatgcaaaataatactagttctgtttatttttatttggctttaaaggaaaaaagtaggggaagaagagggatgaggtctcagttaatgatcaagaaaatatggcagaagttgacatctacctgagataaatcaagatcaaatctttgtatctcttctttgtcaatggatcctttcttctttccaagcaatacatttatgtctttctagattgataattaatatcccatattaattaggctcatgcctataatcccagcattttgggaggctgaggcaggaagatcacttgagcccagaagttggggatgagcctaagcaacaagggaaaaccctggatctacaaaaaataaaaaattaaccaggcatggtggcgcacaactgtagtcccacctactcaggaggctgaggcaggaggattgcttgagcccaggaggtcaaggctacagtgagccaaaatcacgtcactgcactccagccagggtgagagaacaagaccccctgtctcaaacaaacaaaaaaaaaaaaaaaaaaaaaaaagactcaacagccactggtcaaagtagctcaacctgaagatctccctctggtcaaggatggggcaatttgaactctcataaagatgagaattgcaatggattaaaactgatcaaataagtttaaacccatgagttcataaaggtattttttcaaacctacttgataaacttttgaaagtcaacagcattatcttgaaaacttagtaaatacaaggaaaacgtaaaacatttattttagattccttatgaactaagccagtaaataaccaactagtagatgaaagaaagaattttctaataaaatcattacagctaataaatcaaagcagagtgacagaatcagaaatcaacagtctgcaccctgcagtgaaagaatggatctaggcaatgtgcatcacatctgccaacatcaaaaacaaggagccaacaggcatgtgaaagaacacagactcacctacaatccgccagcccaggaggctgaacctgaggctgttgaagcttctggatccagctgccaacttctaggaggtcagaaaaccgaggagcatgttaacctgcaacatgagtgcccaatcagccaaatccagattgagaaccactccgtgggtcaaacggcccaggttcttcaatacataaactgtaagaaaaatagatggaggaaaacctgtaagctaagagacagcagacagacagaaagacatatataaaattatgtattaaaattttacacacacacatataggcttttttaatgggaaaaactacagcatttagagctacgtgtttttaattaatacaaaaagatgcaaaggatttatcaatataatagccaggatagtgattactttgggcaaaagcaaggaaatttctagagtaactgacaaaattctagtaaaataaaatggtctaaaaatgaatttaaaagtaaaacaattgttattttattatcattatactttaagttctagggtacatgtgcagaacgtgcaggtttgttacgtaggtatacatgtgccatggtggtttgctgcacccatcaacctgtcatttacattaggtatttctcctaatgctatccctcccccagccccctaccccccgacaggccctggtgtgtgatgttccctaccctgtgtccatgtgttctcgttgttcaactcccacctatgatgagaacatgtggtgtttggttttctgtacttgtgatagttggcttagaattatggtttccagcttcattcacatccctgcaaaggacatgaacttatccttttttatggttgcatggtattccatggtgtatatgtgccacattttcttaatccagtctatcatagatggacatttaggttggttccaagtctttgttattgtgaatagtgccgcaataaacatacgtgtgcatgtgtctttatagtagcatgatttataatcctttgggtatatacccactaatgggatcgctgggtcatgtagtatttctagttctagatccctgaggaatcactgcactgtcttccacaatggttgaactaatttacactcccaccaacagtgtaaaagcattcctatttttccacatcctctccagcatgttgtttcctgacttttaatgattgccattctaactggcgtgagatggtatctcattgtggttttgatttgcatttctctgatggccagtgatgatgaacattttttcatgtctgttggctgcataaatgtcttcttttgagaagtgtctgttcatatcctttgcccactttttgatggggtttttttcaaaaatgataaaaatgaaaaaaatgttatttttaaaagattttcaaaaaaagtgaatccattacgattagggataccacatggtgaaacccttatgatagacatctacaaaaagaaatgtctagaagtcttgaaactttcataccaaaccaccaactctgaatggtgggtggcactgaggggccaggagtaagagggggagggaaccaggagactcagtacaggagcaggtttatgttttgctcaatatatttttgttctgtttgcatttatactagcaacttttcatgtattattcatatagattaaatgactcaatcaatctaggagtgagtgagctatcaattgcccaagcaagtgagtgagtgggcaaatgaatggagaaagaaaaaagtatcccagtatcataggcaggtcctaatagtaaagtcttcataaaatcatgtacagtaaactacaaagcaaaaaaacagatcatgcaaaatctgatcaacccagacattttagagcctgtgtatgtgaagacacttaagtccctagtcacagatacaatgagcttatatgctaaaattttataaatgaaaattttacaaggtaacttgttgatcgaccagtcaaatatgagttcagaaccagataccatcttaaatgatccctgtgcccaccctaataccatcctgcctgccctccagggaccctccaatcatgagaccctaactaagaagtcttgctgcccaagctgggcacggggactcccgcctgtaatctcagtactttgggaggccttcaagggaggattccttgaagccaaaagttaacaccagccctggcaacactgggagaccctgtttctgtaaaaaaatttaaaaattagccaggtgtggtggtacacacctgtggtgccagctactcaggaggctgaggtgggaggatcgactgagcccaggagattgaacctgcagtaagccatgatcacaccactgcactctagcctgagtgacagagcaagaccctgtctaaaaaaagaaaaaagaaaaaaagaaaaaagaagtcttactgcccctttaaatttcatgacccccagagtatttgaaagcacatttctgaatccacccagaattacttctttacaaacattccaaaaaaaaaaaggcgggtcgtggtagctcatgcctataataccagcactttgggaggccgaggcgggcagatcacctgaggtcagggtcaggagttcgagactagcctggccaacatgatgaaaccctgtctatactaaaaatacaaaaattagctgggcatggtggcagtcgcctgtaatcccagctactcgggaggctgaggcaggagaatcgcttgaacccgggaggcggaggttgcagtgagccaagatcgtgccattgcactccagcctgggtgacaagagcaaaactccatctcaaaaaataaaaaccagaaccaaagcctctgactcacttatcaaccagtgtccaaattcagagtagagcagcattctttcaaaattgaagcaattgaaaacaaaacaaaaacaactctacctccaaccaaaaatcatatgtaactctgagaatccaagttttcagatgcttgttggagagagaatgtgttgcttaacttatctcagcctcagtcagggtcctcatctataaaatgggaggataagcatcccctgcctcactaaggagttataaggatttcacaaaatcctgggaaactcttagcacattgctaggcacacagcaaatgctcaggagatgtttgttgtggtcttaattttttttattaaggcatgttttaactgtattaccttgggtaaagtctggtaaggccagatgcaaaacaggagagataaactagaaagagttttacagatttgctactcacagccctgtggggagaatgcagcgggtcacactgggccactctgggaagtgttggctaccagggtcgacagaaggagagagtaggaacaaggaaagcgtcttcattgagaagaagcagggaggtgggggggagtctgggtaagcaggcttagcattggctagtctgaatcatttcagtggactcccagccataggggctgtcctgagttacctggtatctgcccctgggataattatggcaggtggatagtggctccaagtttgagaggttaattgtattagtcccttctcaccctgctgataaagacatacctgagactgggtaatttataaagaaaaacaggtttaatggactcacagttccacgtgaccggggaggcctcctgatcatggcagaaggtgaaaggcacgtcttacatggctgcggcaagagagaatgagaaccaagcaaaaggagtttcccctcataaaaccatcagatctaatgagactgattcactaccacaagaacactatgagaacagtatgaggaaaaccgcccccatgattcaattacctcccaccacgtacctcccacaacacgtgggaattatgggagctacaattcaagatgagatttgggtggggacacagagccaaaccgtatcactaatacaagaggtagctgggaatactgacgtcatcagctgctcaaaaaggggaactgacagcttctagccaagtcctcaaaactgggccaaagcagcattataaaaactatattacaaggtaaaagtcacactacataaaatcagccattttaaaataaaacattcaatggcatttagtatactcacaatgttgtgcaaccagccaccacctctgtctagttccaaaacactgtcatcatcccaaaagaaactctggactcataaagcagttactctccattctcccactgctaccacctcgtttccagtcctgccagatcctggcaatgaccaatctgccttctgtctctatgggcttacctattccagatatatgatataaatttaatcatacaaagtgtgactatcatgggctgaattacgcctccctaaaattcacatgttgaagctctcaattcccaatgagaccatatttggagatggggctttttaagaggtaattaaggttacatgagatcataagggtggggccctaatcccataggagtggtgtccttatcagaagaggaacacacgccagggatgtgagtgcacagaggaaaggccgtgtgaggacacaacaagaaggcagccatctgcacgccaaggagaaaagccttgggagaaaactaacctgccaacaccttgatcttaaacttctagcttctagaactgggagaaatcaatttctgttcttcaagctgcccagtctgtgatatttcacaatggcagcctgagcagattaacacagtggctttttgtgtcacatagcataaagttttcaatgcattgtaggaggtgtcagtacttcattcctttttaatggctgaataatattccattatatgtatataccacaatttttttacccattcatccattaatggatatttgggttatttctgccttttgggtattgtgaataatgctgccataaacattcatgtccatccatttgtttgagtaactgttttcaattcttttaaatacataggaatgaaattgctgggccttatggtaattctatatttaacttttcaggaaccagcaaactcgttatttttaaagtattcacttcagtgcctatcacgtacaggccctgtttcacagagtgggtggaaatatctatgagccatcatccctgccctactgcctctgcaggttctgtctgtgagaaccattcctccaaaagaaaagcagtagctataattttccatgggatcttagttttattcaaaatgagtacctgggcaaactcatgacaattgaacctcaaatgtcaaagtagcctttgttttccaaatatttatatttcaaatgtttatgggcaaatagacctattctcttaattaatgctgatatcctctaagtaggccaaacttgaccttctacagcatcaaataaaatatatttctaggcctccgatcatacacatccatgcatgaatggatacaaaatggcagaaaggtcagagagacaaagactgccaaactggagagggatcgattaacagagttcgcagaaacacggacaggaagaaaacatagcagacctcagagaacctaagccagggcagagattcaaagaggagaacaacacaagaatgccaggatgcagagaggatctaccagttttggaaggaggcagggttaagagatgagagaggaatgttagtttcatgcccttgccaatatctttcatagctaattacaccctgacaacctataaattcctctaatagttttcactggagaaactattcttctacccactcctacaaatatgaagcagggtcgctggtccagactagcttccagaatcacccaagtggtgctgattatcagtggtgggtgtggacaacggagaaaacaagaaggcatttttctgagagcccttgtggcaaaaatcaccttgtatggtaaataccagattccacacatcaagtgtccttatttcctaactgaaagaaataactaaggagtttctctctttcttgctctcttctcttctctctctctctctctctcctcttcttactctccccactctccccaacccctgacctgaagatccacacaatagctaacctctctaaccaatcaactctcaaagtctatttttcagagacatgggatttctctttctcaccatggaagggttcggattccacatatgtcacctaggagacaaaaattgagtgtttcagagaaaacaagctcactcgtctccaaccagcactttctctcatggttccagatgaagaccataatattaagcatttctacggtacctttcgtcttccagtacttttcacacacagttcaggaaaggagggagcagtggtaggctgacacatcacctccaaaaccctagaccactgtttttcaggtggctagtctatatcgcgactgtttaaataaagcagaaaccagataaaagctcattcaaagggaccagttatagaaagagagtgaactatctaggggcaaaagaaagtaataaaatgttcaagtccccaaacataaggttcatctctgctaagggtgactgactgtggagtcaggcacgcctgtttcaaattcttatcctgccacttactacctccatatcctctgaaagcattaatattctcattggggaaaaaaatgggagaaattacctacaaaataggtttaagtgaattaacgtctagcctaatgatcagtaatggtggtggtagtaataataatatgccacacatcaatgacccaagttttagagtataatttattatgttatagagctaaatttttctaaaatattaaatagtttgaagacccttgaaagtgttgaaaaagtaatgtgttttcacttttgagaaatttgcaggttggttttttaatggttttaaagcctctgcagctgacagcagggcattattcatgcagcaccagtgggtaaacctaggcccttccatgcttgtgtaaggatatctgggtgtgagagatgtaccatgttataaccatacaggcttcttctccaatccatcaccatgttcaccgccactatttcctttctgggcaaagacttggaggtggcatcatttgtagaaggaatttctccagggcacagaaagacttcccaagaagtactgatttaaggctgaaagttgttagtaacttctatgagtgaagacaggagtgaagaatgtggaggcttacaattgctttctcatcaacagataacttagacatgtgaaataatttttttaccttgtagatttgggacaacatcttcccttgaatacaactaatcaaactgggcttgctaggagaattttgaacgtccaactgcatgttcactgatggctttaaaatccatatctccagcacagatcttgcctatgaactcccaaaccatcaattccacctggacatctcaaattccacatgtccaagtctgaccttatcatctccttctcaaatctcagcccttcttccccacctcctttgaatctctctcagtgcatcttcctggatctggtctcactgggtagaaactgaggggtcattcttggcaccattttctccatctctgcaacacacatgaaaggcaacccatcaccgactcttgtccatctgcactgcaaataaccatcaggtctcactgcttttctccaattccatggccaccaacctacagacccaggagaccaatatttattgcatgaactagccctccagcatctgccttggccctgtcctattctcttcctcacagtgaccagaataatcttctcaaagttctaccttaaaacccatctggacttcccactgtccatgagtaaaggagaaaatcctgagcatggccttctcctttaccatgctcatcatgctctgacctcacagacttccccaccctgagctccagccagagaacttcagttatacacccgctcatgccaaagggtatttactcatccatgttcttcccctctcagaggctctctttctcctaactccctcttccatctgaacaattcctactttcccttcaaatcttcatgtaaaaatcacttcccaaaaaaactctcttggtcaggttcgttggttccatatggtcccatgtgctcatggaactgtatctctttctttcattgctctcctttcagtccactttgattccctcaccgttgtgcccatgtgtcactgtgtgtcccctgctagactgtaaggtcagtaagagcagggactatgtctggtttgcccaccattataacctcactgccaagcccagtgcctggtaaaaagaaggcacttggtgaaaatagatgttgaatgaatgaatgagtgaacgaatgtaaagaggtatatgacacatctaataggaggatgggggaatttgagtgtaaccttaaaaagagttcttctataaggccgggtacagtgacatgcacctgtagtcactgctcaagaaactgaggcaggaggatggctagagcccaggagacgcaggctgtggtgtgctatgatcatgcccacggacaggactatactccaacctgggcaacatagccagaccccatctattttttaaaaaaggttctgtaggacaaaatctcagagcatggcaaaggaagggcagaagggatattgtttcccaggaaaatactacagcaaatttgtaggaagaaagggtgcaaacacttgggtatcctcccctcatgtcaccccttggaatctcagctttccgacggagcaagtaggggtggaagtgcttggaagaaaagaggaaaatgttgcaaaacattctaaagctatcaggacaaaatgtatacgtgccagagaacatgaggtagaaattgtacttatctatagttttagaaaatgagcaaggaggctgggcacattggctcacatctgtaatcccagcactttgccaggccgaggcgggtggattgcttgaggtcaggagttcaagaccagcctggccaacatggtgaaaccctgtctctattaaaaaatacaaaaattagcagggcatggtggcacaagcttgtagtcccagctactgaggaggctgaggcaggagaatcccttgtacccgggaggtggaggttgcagtgagccgagatcacaccactgcactcctgcttgggcgacagagtgagactccatctcaaaaaaaagaaaagaaaagaaaatgagcaaggagatttcaaaaaaatatccatgtattttatatcccttacaaatcacatagctccatccccatcttaaaacccatttgaaaatttctaatgaatgaggagaaatagtcctcagccctcctccaaggtatccaagggagtgagaccaggcaaaggttttgtatgtcacaaaagccacatcgtgttccaaaaggaagatgagtagagatctgtcccacccagcaacaaagaattcctcagcagagagcagaaactgatctgcttccaagctgagactgcaggaggatgtttgcccaaatgctgcaatgacttccagtcatgcctttgtttggtttcggtaattacttgttcatttaaaaagaaaaagaaatatatgaaaatgaacatttctctcacatgtctgcctacatttcaaataaaggtttcatgtggcatcttgaaggaactgaaaccctagtaacgcaaggagaaaaccatcctgcagaaaaactggcaccccccccaaaacagctatcattctgttctttccagcacgaaaagggaaagtgtatttctctgtttacctttacattttcaactttaaagcaatgtcaacaataacctgacattgcatttcaagcagaacaacagcattctaaactccggcattatagaaaagtaaaaaatggatatgcagctggtttctcttgccccggctcgtaagatggagaaaatgtttgaaaagtaaatcccatgaattacaggtgatgttgtcgcacattcagccttctcttatcccacctgtcttactccagcgtctctacctgagctacctccaagccaacatagagcccttttcttctaagtttgctaaactttcatctttacctctctgacattttcttgccttgccaaaattcctaaagctttcagggtggttaacaaacagtaggtgtcagcctaagggttaagaattcatgctcccagatgataatcatcagtagattgttctggaaaattaaatacacctgagccaagtttcttaaggctgtactctggagatgtttcaatttattttttaaaaaaagaagaaacagttcaagaatgtgaactttgtttctcacatatattttcctaggcttcttttctttccttttgttttttttttttttttttggtatttcactatgtgctttggcttttccccagatttttacctacccttgtcctctctgacatatgaaaaatgttcttgcattctgccaccttagcaagggcatcgaatgacaaaagaaactgttcattccagaagtcctgatggcactatcgttagatttagactcacctatctgcacagacttccagaggcaaggacagacagcacgtggctcactcgataggtggggcattcattcagagatgctcacttagtgcctactatgcaccaagcattgtgcttgcagtgaggctccaagaaactaatagggatattctagttctccaggaattcccctctgttgtgagtgatggactagaatagaagtaggcacaggctgtaccagaagagcagacacttgctatagaaggaaggccaggaacactgcttgtgatgtggctactgcttcactggacggtgaaggtgcctaacagccattccagagagaaaggccagcagagacaaaggcacagaaacatgaaagggcagagggtgatggagacacaggtgtttccaggtggccagaccagatcacagcaagagtggcaaaaatgaagcctataaatatctgttgaaaatagattataatgggagaaaaattttgcaatctatccatctgacaaagggctaatatccagaatctacaaggaacttaaacaagtttacaggaaaaaaaaaacccatcaaaaagtgggcaaaagatacgaacagacacttctcaaaagaacacatttatgcagacaaaaaacatgaaaaaaagctcatcaccactggtcattacagaaatgcaaatcaaaaccacaatgagatgccatctcacaccagttagaatggtgatcattaaaaagtctggaaacaacagatgttggagaggatgtggagaaataggaatgcttttacactgttggtgggagtgtaaattagttcaaccactgtggaagacagtgtggtgattcctcaaggatctagaaccagaaatactattactgggtatatacctaaaggattataaatcattctactataaagacacaggcacacatgtttattgcagcactatttacaatagcaaagacttggaaccaacccaaatgcccatcaatgatagactggataaagaaaatgtggcacataaacatgatggaatattatgcagtcataaaaaaagaatgagttcatgtcctttgcagggacatggatgaagctggaaaccatcaacctcagcaaactaacaccagaatagaaaaccaaacaacgcatgttctcactcataagtgggagttgaacaatgagaacatacggacaaagggaggggaacatctcacacccggcctgttagtgggtaggaggaaaggggagggagagcattaggacaaatacctaatgcatgcaagacttaaaacctagatgacaggttgataggtgcagcaaaccaccgtggcacatgtatacctatgtagcaaacatgcacattcagcacatgtatcccagaacttaaagtaaaataaaaaaagaaaatatattttgagagttttggagtgtcatgctaagaaggttggatttatcctgcattaagaggggaaaatacaaggtgagctttccatctagcaagaggttcaaccaggagctctactagaaaacataatgcactgtgtttcccctgtggctggagaagtgtgcattgggagagtagaaaggagggcgaaataccttccaactgatggcaatttggggaggacttcacaaagaaggtggcctctgagcaacaccttgaaggatgagcagaactgagcccatgagagatggtggtgaggaagggtgcccagctgagagcagaggcacaggttggtgagtgggcatgtcttactcaggaaggagcctggggtcttctagggttggcctatggctgttggaggtttggagcaggagaaaagctggaaagttactctgagatcccattgcggaggcctttgaatgccttgttaaggatgttgtcctgaaggcaacaggagatctacaggattaggatttagaagttaactctggcaacatggattggataaggagtgagaccaggcaaggacactagtccagaggccactgcaaaaaaataggcaagagatgagaagagccttgtggctgagtctgggtgtgctggtggctcatgctgcccagcctcccttgaagctgggtgtggccctgtggaagatgagcaggaggggcatgcccgactaccagacctacccatcaatgctcccagagggcctcttcattacctttttccttccagctggcaggcataaagctgacctcagggtggccctggaagcccaataaacacggctgagccttcagcagcctgaatccctgaatgactgcatggacagggccacactggtgaccagctgactcacccagtactgttacgtgaccaaaaactaaccttctattggttctgtgacattttttactttgagatctatttattgtaccagcaatgcataccctacctaacactgatggttagatggtacagtggagatggaaagagaccgtcaaaagacattgtacaggttagtcctcaagacttggctacccatttcaagtggaaggtaagagtgaagagtgaaagatggcgccaacatttgcagcctggatgaaggggcaggtggtgaggccattaatctgaaagagtgaccatgggaggagaaggcttagaggaaggcaatgagattcaccggggacctgcagaagttggggtatctgtggggagaccggggtgggactgtgcagtgggcagttaggactacaggcatggagcctaatcatagaggccagtaaagctgcccaatcgcctccagaacagcccaggctgcccaggaggcctccctttgtactttcctcacactacaaaaaaaaaatgtagcaaatgtcaaagacacacagattgtattaattaattatttaaaatatcattgacaacaataggtgaactctgaatgggttacaggtgataaattattctgggttttaaaaatccccactctgtgcctcactagcatagcaggaaacttagtctctcagggcttctgttttcctcctgtgtaaaatggatgcctctgtccttgctgtgtggctgggaggaataaatggggtgatgtagtcaccagcccattacacagggctcagataatcaccagtatgtgtgattaccataagccattcttctaatattggtaacaacagctgacactgattgaattattcttagtgttctacctgatctacccatttaatcttgataactcctcgaggtaagtacctccattttccccactctatagatgaggaaatagaccagagaggttaggtagcttgctccaggtgatacagctaacagtaaagctgggctatggccccatcaggtagagtctggctcacggactctttcctgccacatgacatatccatggcaggagacacagtcctctcgggagcacggatgcatctccaatgactgaaagcacttgctcatcatttttgtggagcattcagcagcagagctggcagttctcaggaggttctaagtggttatgagaacctcgactcattcttgaagagcagttttataataacaggaaaaagtcaataattccagataaataaatgccggttgggcaaaataaccctgaggcttatacaatgctcttaatttttcaaagcatgtccacaggctgcatcccatttccaaagggcattggatacaagcccttcaaaggtccagggagggaactacggtaccctggcagagaatatggaagctgtcatgctgcgaagacagcttcactgcacctggccctcctctttctcatgctgaaccttcatgaaccaggaagacgagtacgatgggagagaggacagagatgggtcattgcagctgctctggccctcacatcaattgcaggacccatcccatttggaaatagcactgctgggaagaaccctctcgagaggctgctgccactgtcattgccactggtctctctcttttaggcggtcctattacttgtttcagtctggggacaaaggcagactggggtgcaggctctgctacaatgtactgaatgttaaagtaccaaaaggctaaaaccagagcaccaggatgatgcttgggaatactccagggcttgggatggctcagcccccagtgctctgactgatggagtataaattcccaaacaggagacactggatgctgtgctgcctccatgttaccaataggatgcccaggcagtttcaaaactgaagagtgtggagcccttctgtagggtagggggtctctgaccctgtctgcggggccctctccaggactcaagctgccatggccatcgtggccagtcctcagccacctccccagctctcaccactggcatgcaaggggagctgtgagtgctgaggccttttctccatgcacagatggcctcaggcccctctcaggattctgcagagctggtagacgtccctctcccagccaggatcctgattgccaggcttcagcacccatgaaaccccacatcttcttcacacagactgagaattgcattcacagtgggtttacccgttcacaggtctaacagagcacttccaccacaggcatttttaatgagctgtgagtgctgaggccttttctccatgcacagatggcctcagacccttctcaggattctgcagagctggcagacgtccctctcccagccaggatcctgattgccaggcttcagcacccatgaaaccctatcatcttcttcacacagactgagaattccattcacagtgggtttacccattcacaggtctaacagagcacttccaccacaggcatttttaaaagctgcccagggcgtctaagaggcaacatcttaaccgataagacccaccgattcaagctcttccatttgctgatgaggaagccaggcccaggatgtgaagagatttccctaaagtcacatagctatgaaggaaacctggtcaccctccagcatgacacagatgctgaaacaactttaatattttctctaggtctagagaagggacatcacctctttcaggggaaggggtaaattgtctttatttacttacacataataattcaacattttaatgctgaacattctacgggctctataagctactagaataaatgagttaccaagattacaggataaaaaagtaatatataaaaaagtactgtatttctaaatactagcaacaaacatcaaaaatagacatttaaaaaacaaaaccacttacaacagcattaaattttttgatacttagggataaatctgacaaaaagaacattcatctatacactaaaaactataaaacattgctgacagaaatttaaaaatcttttaaaaatggggagaaacaccatgtctatgagttgaaagactcaggattgttaaaatgtcaaattaatctatagattcaatgcaatctcaaacaaaatgccagcaatatatttgtagatatttacaagctaattctaaaatcagtatggaaagcaaagggcctattatagccagaacaattttgaaaaagaaataagctgaagaattacacctgatttaattgtgtttggggcttatggctttttaaattttttaattaacagataatcaatgtatatattcatgaagtacaatgtgatgtttaatatatgtatacattgtggaatgattaaatcaacctaattaatatatccatcacttcacctatttatcatttcttgtgatgacaacttttaaaatgtactctttgcaattttgaaatgtgccctacattattactagctatagtcacaatgctgtgcaatgcatcactaaaacttacttctcctttttttttttttttttttgagacagagtttcactctgttgcccaggcaggagtgcagtggcacaatctcagctcactgcaacctccacctcccaggttcaagcgattcttgtgcctcagcctcccaagtagctgggactacaggtgcacgccaccacacccagctaatttttgtatttttagtagagatggggtttcaccatgttggccagactggtctcaaactcctgatctcaaatgatccacctgccttggcctcttctcctatctattaataatggaaattgtacatcctttgaccaacatctttccttcccccctcttctccaccagactctgtctctgctttttctacctgcttcaatgtgaatatctttctcagttgttcagtatgcaggagtctttcacctagtttctgctttctctcagggagtattgatccatatgtaggtgttcattaggtgcatctgtcagaaaagggatagtcaggaccctcctattccaccatgttgctgatgtaacatcacctcttgatttgaatcctccctagtgaacaatcacctagctctcattggtaacagcaacttctccccttagcaaagcagacttcatagcagggagcactgaggctcaaagaagcagcagcatttgctgataaacaggtgctggagaatattcagagcagcaagagcagaggtgtggatgtgggacctcctgagacccataacatggacccagagtaaatcgttcaatgggatggagcataaggtggtgaaacagaaaggtgagaggcagatttaaatgatgtatatccttgtcactgttcttcaaaactaacttccaattaatatgctgtatggtaaacatatctgagagcaataacgtagactccctgagactgaccctgtatggcagacacatctaaatgtgtgctctgagctaggaaatctgacagcgccaaacacatagatttgttccttttctatgaggaacatctgagctccgagcctggcccatggaacacaggccatactgggaatcaaggccctttgttttggggtaagtgaaagttgccagttgaagactgtcggagggtgctaaaagaaaatgtgatgtaagctgcatgccttttgcaagcagttgcagttataatgctcagcctgcccccactaggccatgcagttctcctgtctagcctgctaccactggactctctcccctgcacgtaagtccccagtaaaacccatgtctcatttgctggctctgggtctcttcttcagcctcttgcatctagtaccacacccactggagtcgatacggattcgacacaacacatgcatacagagatttaagtcccaccatgtataattctatcttatagcagtttcaagaagtctgtaccccaggagcattgaagggggatcaaatcttactaatcgtaggaaatagcttcatctaaagaagaatttcccaattgttggagcttttcttaaaaggcatgggctgctgacaaagtaatgtgctccctgttgctcaatgcattcaagcaactggatgcattcaagatgggctggatgaccatctgcctggaaggtcaaagagatttttaccttagtaggaagttggtgggaggacttttaaggaggcttccaatcatgacagattgtgatcttttgggtaaagaactaagacttcacctgggtttgaaccccatctctgccccttaccagctgggtgacctgggcaaagcatttaacctcgctgtcccagcttcttccatagtgaaatggggacatgtatcagtgtctacctcatagggtgattgtgaggatgaaacgagttgttccatatcaagggtcatggacattatcaatgttgaataaatgttggtcactgttcttatgatggcgttgttattatggattgtgactccccatctttcatttaaggagatgccacttaaatgggctccacaacacaacattcctgcaagcacagaccaggcacaagatacctggtatccttctgacagctcttttttttcctgtatcaaaatgaagcataagatgaatgggaaaaagatgagacacagactttaaaaatcaatatccttataactattcttcaaatataatcaccaattatattaattatattaatacttatacagaagtgtaagtctcatctatcttattagatagaattccaatgtgaatccaccttcaaccctttgaacagcacttctggtgagggagggtggaaattcacacaggggacccttcctgcgtttccaccctggctcccagatgccgcatttttcagagaagtttgccttgaacttccatgcacctcctcctaccccctgcaaatttacacacagagcacctttgtgagccgaagactgggcacggacagagcacagagagggcttgtcaaagtaaacgagttgattcatgtgtaaaaatcccccgactgcgtttacagattaaattggaaaaactttcagctgcttttggttgaaaattccactcaaatatttcattggatgcctgtgccttcggcacatggagttccagtgcttgcacaatagtctgcacgtgcaaacacaaagctcggtggtctgtgagtggcatgtggcttcaaaaggtctgtgtcatctgatggccaatggtttcctgcatatttgctgtataagcacatccctgtccacggatgtgctgaattaatgataagcccacaaagtttaacaaggttcaggtggagggctctcgaatttttgaacttcacagcactagatgcttgaatgaatctagcaacagtaaattcattactttgttggcagcttgtgcctcttaataaagagctccactgattaggaagagacagctgtagatctgcattgttccatgtaacagccaccaaccactgtggcctttgaacatttaaaatgtggctaatccaaaccaagatgtgctgtacaggacctgaactcagctctgggtcaagcagacccgacaggtatgtacagaactctccacccaaaacaacagaatatacattcttctcattgccacatggcacttactctaaaattgatcacataatcagaagtaaaacactcctcagcaaatgcaaacagaactaaaatcataatagtctctcagatcacagtgcaatcaaattagaactcaagatgaagaaattcactcaaaaccacataactacatggaaactgaacaacctgctcctgaatgactcctgggtaaataatcaaagtaaggcagaaatcaagaagttcttgaaaaccagcacaagacaagttctggccagggcaatcaggcaaaagaaagaaataagaagtattaaaatagaaaaagaagaagtcaaattatctttgtttgcagatgacatgatcttatatctagaaaaccccattacctcagcccaaaagcttcttaagctgataagcaacctcagcaaagtttcaggatacaaaatcaatatgcaaaaatcactagcattcttatacatcaacaacaggcaaacagagagccaaatcaggaatgaactcctattcacaattgctacgaatagaataaaatacctaagaatacagctaacaagggaagtgaaccacctcttcaaagacaactacaaaccactgctcaaggaaatcagagaggacacaaacaaatggaaaaacattccatgctcatggataggaagaatcaagattgtgaaaatggccatactgcccaaagtaattcaatgctagtcccattaaactaccactgacattctctgcagaattagaagaaactattttaaaattcagatgaaaccaaaaaagagcctgaatagccaagacaattctaagcaaaaacaacaaagctgaaggcatcatgctacccaacttcaaattatactacagtaaccaaaacagtatagtactggtagaaacacagacacatagaccaatggaacagaactgagaactcagaaataagattgcacacctacaaccatctgcccttcaacaaacctgacagaaacaagcaatggggaaaggattccgtttaataaacggtgctgggagaactggctagccatctgcagaaagttgaaactggactccttctttacaccacatacaaaaattaactcaagatagattaaagacttcaatgtaaaacgccaaactatggaaaaaccctagaagaaaatctagtcaataccattcaggacataggcatgggcaaaaatttcatgatgaaaatgccaaaaacaattgcaccaaagcaaaaattgtcaaatgggatctaattaaactaaagagcttctgcacagcaaaacaaactatcatcagtgtaaacagaaaacctacagaatgggagaaccattttgcaatccatccctctgacaaaagtctaatatccatggtctacaaggaacttaaacaaatttacaagaaaaaaatactaaaaagtgggcaaaggacatgaacagacacttctccggagaagacatacatgtggccaaaaagtgtatgaaaaaaggctcaacatcactgatcaacagagaaatgcaaatcaaaaccacaatgagataccatctcataccagtcagaatggtgattattaaaaagtctaaaaacaacagatgctggtgaggttgtggagaaataggaatgctttcacactattggtgcgaatgcaaattagttcaaccattgtggaagacagtgtggcgattcctcaaagatctggaggcagaaataccattggacccagcagtctcattactgagtatatacccaaaggaatagaaatcattctattttaaaaatacacacaaatatatgttcactgtggcactattcacaatagcaagacatggaaccaacccaaatgcccatcaatgataaactggatatagaaaatgtggtacatatacaccatgtatataataatgataaactggataaagtaatgataaactggataaagtaatgataaactggataaagaaaatgtggtacatatacaccatggaatatactatgcagtatatatatactatgcggtatatatatatatcataaaaaggatcatgccctttgaagggacatggatggagctggaagccataattctaagtgaagtaatgcaggaacagaaaacaaaacactgtaagttcccacttattattgtgagctgaatgatgagaacccataaacacatggtggggaacaacacacactggagcctgttgggggtagggggagggagaacatcaggaagaatggctcagaataaacaaataaataaattagatgtgttgtaaaatacacaccaaatttcaaagacttagtaccccaaaaaagtcaactaactcattaataactttttatagtgattatatgttaaaatttggctacaacggattaaaacatattactaaactttttttttacctttatcatagggctactagaaaaatttaaattacccatatagctcacattatattttaattatataatcttaacccagagtattcatgaaaacgagaatctcatagaggtagcacaggaatctgcatggttaacaagcatccaagtgattaaggtcactgctatttgaaaacccctgactcagcagtgacctgaagcacgagtcaggacacttggattctaaacatcattcagttctttttcttacctgggactccatctcctcatcaatagcatgaagggcttggattagacctggaaagttgtctgatttaaggcttccgattccattatccactgattgtccatcaacccataaacctaggccagcagatgtccccagagactgaatgtacccagatggataccagattcaggcaggtgtgaccttagggaggctttcctggtttttcacatcctccggaggactctgaaagaatggtcacctgggggcttcccagaggagtacagctaactccaggggaaccacatggaacgttgtctgcatcaacatccttatcgcgaccaactgcccaaggactgccatgtacagcacagcctctcgatatgtcccagagcagactcacactcttaggctgccctaaaaatggccaagattccatggatcaaacagcagaagaatgcagcccgtcccaaggaaggttactcgactcaagctaccaacctattcagccagaagaattccttttcagaagcagattgggaaaccaattttttttcccctatggaaccatcaatttcacctttccaagatgactctgacgaaagttgctaacccactcttcagaacctttgaaattcatctttctaattgaagggaggttttccagtggggaaaaaatggctcattcgaaataagaataaatgtgttcggcgtcggcgtcgctccgcgcgggggctccaggccgaagtctcgccgcgggctgcgagtcaaatgccggtggttaagggcgctcgagaggcctctacccgtttggcgttggctctggcgtctgggtcgttgtgtcctgacaaccgctcaggtaaccgtttcctagacagcgggtgcggctactttagccctgagcgtgctctgcggctgcctgcgggtctcagctagtgtccgacccctctcttcgcggactccacgccgagcagccaccctgagccaagagccggaagtcccggcattggcggcctggacagcctcgcaccggccaatcaaggagaacctcaagaacaacttcctctatgacttcctctacggcggtgtcggcctaacagctccacgggagtgtggacgaggagctgagcaaaaaaattccagaagtgagatgaaatgaacatcctggcgacatatcatccagcagacaaagactatggtttatgaaaatagatgaaccaagcacttcttcccatcgtattataggtgatgatgaagatgtatgtagtgatacagagaccactgaaaccatggaacgagatatcttagctaagaaattcgctgctgcttgaaggctcggagccaaagtatagggttcaggaataagatagcagcagagaggaggatagtgacctctcacctgaagaacaagaaaaaaagcgacaatttgaaatgaaaaggaagtttcactacaatgaaggactcaatatcatcaaactagctagacaatttcaaaagacctaaatgatgacgaagatgaagaaatgttagagactgtagatggagaaagcatgaatacggaaaaatcaaatcaaggatctactgcaagtgaccaacagcaaaagaaatcacgaagttcatagaagagatttgttcaacgctgcaattgttagatataaaccctgttactataatgcattgcttcttgttctccacaattcatgactgaagtaccaaaatgcataccagttattatatattgccaagaattaaatgataaccttatagagactgataatgcctaaaatatattcttgtgcatagtactttaccacaaatacagtgtaatatcatcagtccaaaactgcattacttttgtaaaaaacactggttaatttgtataagatatcatataactttttatgctttagaggttaaacaatgtctttgggggggaacatttattgtcatcactctaaatgtggtggtagctcttataaagtttgttgttgttttaatcaaaagccaactgaacagcatataaagactgataaatattcaggctgagtagtattttaacgcttgtcttcaacttgatttgtctgtttaattgaaaagggttgtaagagttaccgttgcattttctggcctactacctttaaaattcctgttgtgtttctttgtatttacaaggaaaggtctgaactttttcttgtcaaaactagcttttttccgacaaataaattatcaggttaaacttgcactaatgtctcctctgttttttgttttggttttttctattttatgtttttggtacactgggcagacttcagagcagctttttttcaataaatattctaatgtagctatctcagcattccctttaaatacctgtcttaacctcctgcttttatttcttacccctttcctcacataggcacacaatcctttaccttttaaaggatcattaagattgtcacaacgttaggaactctttctctcactcttctgtcatttgctgcaatattgaaattcttattttgaccatcaatgcctatgaattcttctaatacacgaagcaaatagattaagtagcagcagtactataggcaggaaatacagtttaactgctgaatttctatacctctctcatttacagcttgctaattaaattgttattatcagtttttttggcttaattagacttaagaaaacaattaactgagggtttttttgttttttgggtttttttttttttttgcatgaggagagaattgtgtgtaaccagtgatatgattattactgaaagtacagacaaaagtaagcctggacattgtttaatttaaatactttaaatagtccctgctttaagggaatacgataatatatactatgacaaatgtactttattcttctaacacagtaagaattacttggaattttttcctgaaatgaagtgcaggaaagccctgtgcatcttgggttagtgatggtttcatttctagccaattatttgtatcttaagtttttgttagtaccaaaataatctgttatatgaacagacttttaaaataatttctgtatattatatatataagaaagcttttattgaacagcttatcttccacttgcaagtttatggaaatatcagtatgtcaaaataaataaaaagtgggagaattatttggtattagaagaatgttttaattattttgatttttttaatgggatataatcaaagtactgctgaactataggtgcagtattctactaaacatttcagctagtaataccactgatttagaaacaaaactgcttatctctgccttctgaatttagaatgttgagattacctgtttaaatctgttttgggggatgtagacattaagtctgtacatacatgtgtacatatattcatgcaccttctgattttggttttcttgtttttgagttcttagaaagtattcacatactcttttttttggtagaagtagctgttgtacaatgaagaaaaggataagactttaaacagttgattctgtttgtgttttctccaaattattttttgaaatttaccttacaagcaaactcattttctggttttcagaaatagatgattatttcagagcagtaagacatgacaaacagcatgcccaggaggattttaggtagtcaaattcagctgagaaaaaggtgttttcaagtcataagttgctcattgatatggtatgaactagtcaaaatatgaaccattataattcaagttagattttcttctggagagacagatttgaatgttcagttctagccacagtagattttactttcaactttttaatcaatatcactttctgtgcttaactccttggtgttgccttgtccgttttcattaatcaaattctgcagggatgactaaaatttgacataatggtataaatggattgttaagaataactttaagttgaagattaaagcaagatgccattttccccatgacttcgattttgtttacattttttcctttaagttagtatacactacacatacataaaatacaataatatgacaacaaaaggaataaatgttcttattttatagaataataaaatgtctgatattgggatatgactggtggtgttatattcataattgttgtaataaaattagtaactcctaaaattaatggaatacctgcgaagcgtaatgagaaaattgtaagaggctcctgcgtgtgctaaatttccaactaaagctgcttatcctgtcccagctccagcttctactagtaaaggggcaagcagaagtcaaaacgatggtgaaaaaagtcagaagcttatattgtttataagagaatgctgtatctcggctcagtcatttagggagctaatcagttaccaagtcctcttattttaattggcatatccattaaaagattattacaaatgcatgggcagttataatgacataaatttgatcattgcctaatagggctcctggttgacccagtttggctcatattaagagatttatgtcagttcctactactctggctcaagcaccgaatactataatgtgccaatatctttgtgtttgttgaaaataatcaatgattaatcaatataggtagaagagtgaaatggctgaggaagccttaatccgtaatctaaagacagaggttgaaccctctttttactgtgcctcaaggtgaatagtcacatcaaattgcaaactcaaagatgcagcttcaattctgccagggcttcccctgcccttttctctcaacagcagaagtagactgaagacaggtgattagggtatttcactgttaatgaaattttcttgaggttggatactaccaatctaatgaggatttagtttaattaaaatgtttgatttgcattcaattgatgtaagatagagagtgttgcagtccttaatttttcaggaataaaatataaaatattgcttagggctttgaaggcttttggtctgcctaacctaaattcctaatccaatgttgagaatactggtttaagtgggaagaaaaaggctgataacaaaataagcgagggaaggaagaatgtttattttatattttcaaattgtcattttgtttttatgttattggttttggggaacgtctttaatgatgtagaatagattaatcccatacaaaaacataagttgagtagggctttgatggtgataaatgttagtataataacgctgttattttttgttaattcttggctaataagtcatttggtaaaaatcgtgtaagaggaggtaggtcttttggagataatagaaatataaagatatgggagttattagtgataacttaccccatgtatgtaataatgataatgtatgggagttatatttaaattgaataaatatgaatacagtgattattaatattttgtaattagtagatgtaacattattgtagaaaggttgtaggttagagtggacattatttagtctatatgtgcaattaataggccagaattttgtatagttatgcctgatttagtcttcctcattctcctatcagaattgataatatagcagtaattaatattacatttgggttaattgatgatacttggaattgagattagtgccagtttttgtcatattaataagattatgcctgatgttattggaattccttgtcttacttctgggactcagaaatggaatggagaaagcccactttttataattactgttatagtgattattacagatgctattgggttgggaatttttatgattgttcactacccagaatatgatatatcaagacacctactattaggactgtagatgcagttgtgttaagaaatatttagtagctgcttctttggatcatgaatttaattttttattaaaatgagaataatggctagtacatttatttctagtcctattcagattattaatcagtgcaagctaaatattgtaagtatagttcctgtaaatttctggctcacggttcacatcactctctgttatatagtatacagagacatacgtattatatatatatgatatctttctaaaaataaccaatgaaattgctttagtaagcattgccatgtcatttttggagggagaaagatagggagcaaagaaggaaatgggtaagatgggccccaatctaaacctcaggtgtgcttcccacaaaaggttccagagagtctctggattccccacaaccagagagcaacagcaggtggagttagattggagatgaaagcatttcagataaatgtttgttgactcacatgtaaggagaaaatttaccaggctgcctaagaggaaaagatcttggcccaaaccttttccttaatcaatggaagaatccccattttcccccactacaaagaaaggagcaaagagccagccacgaggtggtcaatctgcaccagctcagacatgagtgcaaggacattctatggcctggaatcttcaacgcacatgaaaagggctttttctatccataaatggtaatgatctacaacaatagggctgtgacactggaagataccaattcctacatcttgctttgctgaggacactcacggttttagcctcagaccttcctagattacattttagctttagttcatattctcatatttgtcctaaatgtcagcctctgatcaagctcattaaacagaggctggcccttcccacagggggcttattatctcagccagacaattcttgccagtaggcaagaggaagaagacaagcaaacttataagagttgtaaagaatggaactgggacccaaattatgagctaaggccttgagtaaacatatacagaggttccaggtaaatggtgattctgtttacagtggaacagggccttcttatccaggatttctcctcctagctgatctgattagcagctccttattcatatctcctgctccaaagttttccattgccacatatacaggtaatggtattttgcacaagaagataagcatgattcaatagaggtaggagggtctggtaatcagctacaacatcaattgcaatatatgatcactagtaacattcccaacaggtgtggccccacctcttcctctgcatggaaaacaattaatggtatcttttttgctatccttggattgtgactaaagtatgaggtgctttcatcataattagaggtgctgtgtcaccaggatctatgttaatgagcaaccagaacttcctggaagataatagcccaagaagcaacccactgtcatcagtgaagaagtgactctgggaagacgttggtgcttggttggtttcctgagcccggcccagcccaatctgcaatatgtagagaccgcaactgaaaagggaggttgttttcactaacaatatccaaggcactgaggaaggggtggctctgcttcagtgacctttcatgaagtacacaccaggtgaaaagaggaatttgctccacaaaaaactacacagctgtggctcctaagggctccaagtatcatcagcacaagcagaggagatggcgcccagggcagcagcagagtggcctggagggcaggtgtcgctcaccccaggggtggcagatggtctcaggtagacctggatgacaacggaggagtctctgctggcaccttcccaggcatcaaggaaataaaatggcagctgccacacggtaactaagccctggaaccatttaggagaaaggtttctgagggccaatgtcccaaagcagctagaaaaataaggtcatcaatactagtgtgaacctcttttaagccccatgagttgtaagatcttaaccacagtctacaacttcaaactttttctaggatgtaaaaattgtggcctggtggcacggtggctcacgcctgtcatcccaacactttgggaggctgatgtgggtggatcacaaggtcaggaaatcgagaccatcctggccaaaatggggaaacctcgtctctactaaaacacaaaaaattagttgagtgtggtggcacacgcctgtaatcccagctacttggaggctgaggcaggggaatcacttgaacctgggagacagagattgcagtgagccaagatcatgccactgtactccagccgggcaacagagcaagactccgtctcaaaaaaaaaaaaaaaaattgcagacacactgaaagcttgtgggttcctccaacgggcagctcagagattccttcttctctgatctctcttcagaatcaggtttcaccagcttaacctgagacttaaaggtgctgaaaaatgaaggtttcaggtgaataaatgggactgcagaacagagattggcagctatcattataacctagtgccaaaggggttagacccatgggttccacctgtctggtgaataatcaccttcactaagaagatggtcatctaccagttatgacctgacatcctactcaatgccttcgagtaggagagtataaagagtataaagaggactagctatcacttctcagcttttggctaagaacaagtgaagggcaccggctttggaattgtaaagatatgaattcaaatcccagttcttctatttgctcatagtatgaattttaacaaattaggtgacctctctgcttcttggatgcctcagctatcacacagaatatatctaatgggatattttgcaggactatttttcagcgttaaattaaacatgtcaagcttctaacagaatgcctgacatatagtagttgccttaaaaaaaaaaaaaaaaaagtagctactgctattaactagccaactttcaacagctccccttatacataaagtgggcatgaaagcaaattagagctggatcctactaatggggggccaggaacagtaaatgtgtttggaaagccataggatttgagagagaaaatctcacagatggcatgatccaattctatcattttttagttatagaacagaagctaagtgtcaaaattaggccatgcggtcaatgagagacagaacagaacacaaatccatgcttggctatggttatgggttgaattgtatgttccagaataagatatgttggagtcctacccccagaagctccaaatggccttacttagtaggatctttacagaggtcatcaagtgaaaaggaggtccttcgtatcattctcatgcctttgcattctcatagcttagttcccacttatgaatgagaacatgcgatgtttggttttccattcccctgggggaaagggtgggagggggttgagggataaaggactacaaatttagttcagtgtatactgctcaggtgatgggctcaccaaaatctcacaagtcacccccaaagaacttactcttgaaactacataccaccatttccccaaaaacctatggaaataaaaaaataacaaataaataaaaggaggtgctcaggaagggctctaatccaatatgcctggtgtctttatcaaaaggggaaatttggacacagagacatgcacacagggaggacaccctgtgaagactggagttacactgccacagtcaaggaattccagcaggtagaagagaggtctggagtggatcttcccctggcaccttcacaggggacctggtcctgcagacaccttgatctcagactgctggcctccagaagtctgagctaatacatttctgtggtttagccactctggttttggtattttgtttaggcagccttaacaaactaaaataactacttcccagtccactaagccaccataccagtagttttccaattctgttccgttggcccctagggtcccgggtagatgtttaataagtggctctcaggagagggtgtgggagacctgatgtgcagttgctgccaatttccatggtgtaaacactccccctatggccaatttcaagctcccagtgtgtggtcactgaatgcagagctgggaattgctgcacacagtcactctcatgaccaggaggagacaccaggaggtacctcagggatggcatggggtaaggggaggaccaaagaagcaggacgccagcattgccaccagcccaaactaagcactgtatgtatgagagcaacacaactgaaactgtaagctccactgcagtagcccatgaccatcaaagcaacaaacccacttccttttcaacctgaagttttttgtatctgttacatgcctagacctctggaaccccaggccactgtctgtaaagatccagcagttttagaggtcactcaggggcgcttagtggaggtcacccttctcatccctggcctctgtttcttgctcattaaagatcgtgctgcttttcactcacctagagatgaatttcaaaaagaatgtctttctttcacattcggcaggagatcaaattccccctcctctctcaaaaaacactctttaggaaaagaattccagaagaatctacccacagattctgagtccttaatctagctatccaatgtgacacagaactcagacactgtgagaaggttttgcttttactgggcctgttctccaggtctgtgctttctaattataaagttgatgtctcagtccttctttgatcagttcaactaagaggacttggtgtttatggcaattgaattgcttctttgtcacgatgtcagattcgtcccaccgttcaactacctctaacacacgaattgtatcaactaagcgcatcaaacagtaatggtgaaagggagagggactagtgcagtggctctcaactgggggcagtttttccccccaggagacgtttggtggtgtttggacacatttttgatggtcacagccagagaaagggatgctactggcatctggtacgtagaggccagggttgctgctacctattgtacaaggcatagagcagccccacaagataaagaattatctagtctaactatcaatagtgagaggttgaaaaaccctaaattcatgaaatggggagcccagaacacattgactgggatagatttggtcattgtcctatcaccgtactaaggtgctggccagtaagacggtctaaagatagaggcatatcttatacatatgacacacgaagaagaacctctatacaactaaattattttcaataataattatgtaataataagcaacaaccattattttctttaattttgcagcaatttaaaaagttaaaaatacatttctattttaaaaattttattcaaattcaagaaaatacttaatgtatgaactaaactttgcacttaccaaacaaaaacattttaccttgcagctctcattgttttattttaaaattcatgttaatcaatggggaaaagattccctatttaataaatggtgctgggagaattggctagccatatgcagaaaattgaaactggatcccttccttacaccttatacacaagttaactcaagatggattaaagacttaaatgtaaaacccaaaactataaaaaccctagaagaaaatctaggcaataccattcaggacataggcatgggcaaagatttttataatgaaattgccaaaagcaattgcgacaaaagccaaaagccgccccgtccgggagggaggtgggggggtcagccccccgcccggccagctgccccatccgggaggtgaggggcgcctctgcccggccgcccctactgggaagtgaggagcccctctgcccggccagccgccccatccgggagggaggtgggggggtcagccccccacccggccagccgccccgtccgggaggtgaggggcgcctctgcccggctgcccctactgggaagtgaggagcccctctgcctggccagccgcccagtccgggagggaggtgggggggtcagccccccgcccggccagccgccccgtccgggaggtgaggggcgcctctgcccggctgcccctactgggaagtgaggagcccctctgcccggccaccaccccgtctgggaggtgtacccaacagctcattgagaacgggccatgatgacaatggcggttttgtggaatcgaaagaggggaaaggtggggaaaagattgagaaatcggatggttgctgtgtctgtgtagaaagaagtagacatgggagactttttattttgttctgtactaagaaaaattcttctgccttgggatcctgttgatctgtgaccttacccccaaccctgtgctctctgaaacatgtgctgtgtccactcagggttaaatggattaagggcggtgcaagatgtgctttgttaaacagatgcttgaaggcagcatgctcgttaagagtcatcaccactccctaatcttaagtacccagggacacaaacactgcggaaggccgcagggtcctctgcctaggaaaaccagagacctttgttcacttgtttatctgctgaccttcccttcactattgtcctatgaccctgccaaatccccctctgcaagaaacacccaaaaatgatcaataaaaaaataaataaaataaaaaaaaaaattgacaaatgtggtctaattaaactaaaaagcttctgcacagtaaatgaaactatcatcagagtgaacagaaaacctacagaacagaagaaaatttttgcaatctatccatctgacaaaggtctaatatccagaatctacaagaaacttaagaaaattaacaagaaaaaaaaccattaaaaagtagacaaatgatatggacagacacttctcaaaaaaaaaaaaaaagacagacatgaggccaacaaacatatgaaaaatagctcaacatcactgatcattagagaaatacaaatcaaaaccacaatgagatgccatctcacaccagtcagaatggcgattattagaaagtcaagaaacaaaagatgctggtgagattgtggagaaataggaatgcttttacactgttggtgggaatgtaaattagaatcaactattgtggaagacagtgtggtgattcctcaaagatctggaggcagaaataccactggacccagcaatctcctcactgggtatatacccaaaggaatgtaaatcattctattataaagatacatgtacatgccgggtgcggttgctcacgcctgtaatcccagcactttgggaggccgaggcaggcagatcacgaggtcaggagatcgagacaatcctggctaacacggtgaaaccccatctctactgaaaatacaaaaaattagccaggcttggtggcggatgcctgtagtcccagctacttgggaggctgaggcaggagaatggcgtgaacccgggaagcggagcttgcagtgagccgagatcgcaccactgctctccagcctgggtgacaaagtgagactctgtcttaaaaaataaataaataaataaagatacatgcacatgtatgttcattgcagcactattcacaagagcaaagacatggaatcaacccaaatgcccatcaatgatagactggataaagaaaatgtgatacatatacaccacggaatactatgcagacacaaaaaggaatgagatcatgtcctttgcagggatacagttaaagctggaagccattatcctcagcaaactaatgcaggaacagaaaaccaaacaccacatgttctcacttataagtgggagctgaacaatatggacacaggaaggggaacaacacacattagggcctgtcaggggagagttgggaggggagagcattagggaaaagagctaatgcatgctgagcttaatacctaggtgataggttgataggtgcagcacaccaccatggcacatctttacctatgtaacaaacctgcacatcctgcacatgtaccctagaactttaaaaatatatattatttaaaaatgaaataagataaaattcatgttaaattttaaacacaaaaactccaaatgttcacacagaataacagaattagagtaactcgagtcttgtttcttcatctttacaatcactgtgctaatgttgtttgtttgcaatccacagtttaaaggcaggaatgtatactactataggtttggaggcacaaactaaaccccaagtgagctcaaatggttctaaatatttttgaacttcatttcaaaaagaacactgagtccacagattgaggggcagggagtgaactccctgtataaccaaattgtaattgtaacttccatgtgaaatagagcttatctatgagccttggagtaaaataccaccatgttctctatgttctagtggtcacccaggccagctgcttcgacgtggataggggctacacaggacatgaatatcatgagaaggtgaggatcactgaggaccatcttggaggctggctaccacatttaaatttcaagatggtcttcagtttggaattcactgttggtcattagtttgcttagtggagacctactatgcgataccaagtgaaatctttgtttctctgctttaatggagggcatagataatgcaccaagaggactttcttattacagcattggatattttcaatgccttgttcatattcctgttgcttcactcatggccagccctgttctcacaagaggcaagctgagctgccaagctagccaagcacggttattatgaacaatatattacgaccatcttggacagctccaattagcaagaaatatgagtagtaactggttctgaattggagcaaacacttagagggaagcattattttgataaatgatcaagatctttcaaacctcaaattcactgcctgaaataactcagtaccacgttatgccacgtctgttccagttcagtcactcattcactcatttcacctttctccctttgcatgcagcatttagaagctcacaaatactcactgaataaacaatactaacaacaagtaaaggcttgtaataatttgacagtttcattctaaatttagcatagaaaaaaacattaaatactaaaacatccacttaaaaattatataagctcaaaattatatatcactgtcataaatgttgatgaagattaaataacatgaggaaacaactgtaacaaagcagaaaataaaaattgttttgacagtatttttcaaactgaaaaaagcagggagccctcttagcatagctggcagcatgtcaatctcacaaactggaaaaagcagctattatagaaaatatattctggataaatatataataaatttacatattagttgtgttttaatgttagaatgaaattgatacatattcctttttctacttttttgaatttctattttctcataaagttttcagcagtacaattttatggggcatgatctttagttaacaatgtactattatgtaatgcaagaagtaaaatagcctagtagaaaagcatagtagaaagaatgctggcctaatgagaaatcctgggaataagcacctgccattgctaatgagcaggatgacacctcttcacttctcaacctctttatctgtgaaagataagaacaggaaatactactcactttatgccagcgaaatacaaaaatttattaggagtagatctcatgttttcttactacaaaaacaaacaaacaaacaaagagacaccaggaaccttgggaggtgtgggatatgtctattaatatgtctattaccttaattgtggtgatgaaatcatggtgtttgcatatgtccaaactcatcaaattgtttatattaaacgagtatggtttttgcatatcaatatacctcaataaaactgttttttaaaaggtatgagacagatttcagtgtttcagagttgctacctttgtaaaaagcaagctaagaaaaatataattccaaacacattgacttcttttattgtttagctgaagagattatagcctgatcacttctgtttaaagataaatgttttaagctgataaacaacatcagcaaagtctcaggtacaaaatcaatgtgcaaaaatcacaaatattcctatacaccaataatagacaaacagagagccaaatcatgagtgaactcccattcaaaattgctgcaaagagaataaaatacttaggaatacaacttacaagggatgtgaaggacctcttcaaggagaactacaaatcactgctcaaggaaataagagaggacacaaacaaatggaaaaacattccacgctcatggatagaaagaatcaatatcgtgaaaatggccataccgcccaaagtaatttatagattcaatgctatccccatcaagctatcattgacttgcttcacagaattggaaaaaaactgctttaaatttcatatggaaccaaaaaagagcccatatagccaagacaatcctaagcaaaaagaacaaagctggaggcatcatgctacctgacgtcaaactatactacaaggttacagcaaccaaaacagcatggtactggtaccaaaacagatacctagaccaatggaacagaacagagaccacagaaaaaatgctacacatctacaaccaactgatctttgacaaacctgacaaaaacaagcagtggggaaaggattccctgtttaataaatggtgttgggaaaactggctagccatatgcagcaaactgacactggaccccttccttacacctcatacaaaaattaactcaagatggattaaagacttaaatgtaagacctaaaaccataaaaaccctagaagaaaatctaggcaataccattcaggacataggcatgggcaaagacttcatgactaaaacaccaaaagcaatggcaacaaaagccaaaattgacaatgggatctaattaaactaaagagcttctgcacagcaaaagaaactattatcagagtgaacaggcaacttacagaatgggagaaaatttttgcaatctatccatctgacaaagggctaatatccagaatctacaaggatatttaaataagtttacaagaaaaaaacaaaccaccccatcaaaaaatggtgaaggatatgaacagacacttctcaaaggaagatatctatgcggccaacaaacataagaaaaaaagttcatcatcacttgtcattagagaaatgcaaatcaaaaccacaatgagatgccatctcacgccagttagactggtgatcattaaaaagtcaggaaacaacagatgctggagagcatgtgaagaaacaggaatgctttcacactgctggtgggagtgtaaattagttcaacctttgtggaagacagtgtggtgattcctcaaggatctagaagcagaaatatcatttgacccagcaatcccattactgggtatatacccaaaggattataaatcattctactataaagacacatgcacacgtatgtttactgcagcactattcacaatagcaaagacttggaaccaacccaaatggccatcaatgatagactggataaagaaaatgtggcacatatacaccatagaatactatgcagccataaaaaaagaatgagttgatgtcctttgcagggacatggatgaagctggaaaccaccattctcagcaaactaacgcaggaacagaaaaccaaacaccacatgttctcactcataagtgggaggtgaacaatgagaacacatggacacagggaggggaacatcacacaccagggcctgttgaggggtggaggaataggagagggatagcattaggagaaatacctaatgtagatgacgggttgatgggtgcagcaaaccaccatggcccatgtatacctatgtaacaaacctgcaagttctgcacatgtatctcagaacttaaggtataataaaaaatatatatatatataaatgttttatttaagagtatcattctgaccatcatgcctcccaccatgcctacactagctctgtcatatcttggtttgttaatgcatcagacacctcaggtgatagcccatcacagtcacctacagctcaggacccaggggtgaacaccaaaatgggcaccagaatgtgtagagaaagctccagaagaagcaggaacccatgtctcttcccatttgatctattcttgttgtgtgtgtgtgtgttcatgtatgtgcaagtgtctatgtgtgtgtttctcccaagttacctcaagaaaacttgatcaccaacgactccagcaggctggacttcttgctacagagaaacaactctggtgagtaggttttctttgttttcctacaaggaaagactaacgatggcagggttcaggaatgtatcaatataggatgtcgttgtttaaaaaaggaaaaagagtcgaaggttctctgtttcagggaatggaggaataacaagatgaaagcaataggaaaaatgaactggcacgaaagagttggctccaggaacttctcctatgcctcttcaactctaaaatcagaaaggtaaaactggagagccactggagcatggagggtaggtttccgagctgcacacttagagctgcacatgagttccccaaaagagtaaaggtggaggccttagaagacacggtgaggactccaggaggggaagaagaggacgaacactcaggaacaaaagcagcaaaggcagtcatagttacagatgccaaagaggaaaaaaggagaacaaattcccatcaaagcaggagggtgttttgagaaagaatgggtggtcaactgcgctaaatgttggaaagagattatgaggaaggcaagaggacagagacacaaagctttttcagtaaggtagccactggtgtctttgggtggcatatttgtaatagaatggtggggacaatcaccaataattacacctcgcattacctcaccagtaagcagaggccgcacatgaggagacagaccagcaaaactaggacagagaaagcatatagtaggaagattgaacacaaccaagtgtgagatttgggcataggaaatgtatagataatggctgggtaacggcaataggatggaagagatgcaaaagggcccaacctagaacatgaaggacccactggggtggggatagggtggaccagccttgaaatcatttcagcaagcagagcccaatgtgcaaaggggtgcaaagcagagcccgatgttgcaactaaccagcagtcacccaggcaggcagacagcatggggcaggggagagaggagaacgcctttgcatcatggtgaaccgtgatgtttttcaacaagtaaactgaatcaggaacaggaagaaatccggaacaagaaatattctaggaagtcagctgaaaggcagccaagctgcattagagaatcagtggcgataaccgggctcccatcaacagactgtgtggttcaggggcaagactccagcccccggggagagctggcaagggcaagaagaaagggctggatccatggaggagtggaggagcaggctcccaaagacagatcagtggcttgagactttgtgagccagtgagcagacctgggtgcaaagcaggactgaaagggccaaaagagtgagtcattgcagcccagagcactgggccagaactcctcagccccttccacgagcagggcagagacggcctgggcagtagcatgtttggctcaaagactcccagcagaagaggacggcaaaggctgagaatcaggcaggagtcaaagaaggggtgctttaaggtaaggggaaggcttaaacagaaaaagcagaaggaagggtaagaaagagttcagagacagggtcataagcattttgtaaggctaaggccaaggaagaagtgggaaggcataaaatacccagcgaatacttggccttgctctcctcagatctaaccagttgcagacctagagctactctagaataattgttaattgaatgtgatgcaccctgaaaggcacccaatcagaagatttgagattgatctgctgtgtgagggccaaggaagaatttctcgattgcgaggactgacaaacacccacgcaagtccctacaagaggttatgaacattttcttctttcgaaattactttttcgccgtgcagattttcatactctgagatacttggtgagtatggttctaaccgaaggcaaagcaacaagttcaataaccccacagggaactcagcagccccgctccttgtcttccaaagctgtccagctcctcctcccagtggctggttttcagttttgcaactcttgaaattcagattgataacttgggcacccttttagtggagatggctgaaaaagtagatttcttcttagccaaacaaaggcttcaaaagcatctcttacaattttaagcttttcaaatggcttcaaaattcacaagtacccataacaactttttaaaactttgtgactttagatcgacacccagaaaattgtacgctgggttttcccttaaggagagaacattttggatttgcttttgttagtttcaaatgaatgacctcatcattggattaatacctaaaccaaaaggatgaatggcttgtgctacttcagctggggagtccaggaacctggaggatgctgcggagccattcagagggatcttggcatgtagcatgttctcaaaactttgaagcagcaatgacaatgagaagaaggaggaggcagaggaagcagtagaggctctaatgaaattcattgcctgaatattaaaagcattcaataatgggctcaaatcaatccattgatggtgcatccaaaaacagctataaaggaaagctagggatatttgtgctatgtcatcatattttgaaggttaacactatgaataacagcctacccttctttactaaatatgttggtgccacttagaatcctgagaatcttaggggtatttttcaactgaaatgggtatttttaactagaaactcaagtggtctgtggccacaaattgagaagacctggcctagtgaaccatgttggcaaacattctgcctatgcctatgaaataatagatgctcaaggcatcatttcacatcataatagcagaaatctagttcttccagggctaaagcagaaggaggtaagggtctgatgctctgacttgagacacagccacagagagaatgattcacatgtgtgtatcttaaatcagtactcactgcccccatgcaactcttgacctgtcttctgtcaaggttaagagcactaatgaggccaggcagtggctcatgcctataatcccagcactttgggagactaaggcaggcagattacctgaagccaggagttcaagaccagcctggccaacatggtgaaaccccatctctactaaaaatacaaaaattagctgggcatggtggtgggcacctgtaatcccagctacttgggaggctgagacatgagaattgcttgaacctgggaggcggaggttgcagttagctgagatcgcaccactgcactccagcctgaggacagagtgagactccatctcaaaaaaaaaaaaaaaaaaaaaaaagcactaacaagtgacagaaaggcaggctggctgtctcctttcctaaataaaaatagatccatgtgctttggatttctcaaacacagatgtatagttagcttttaaattttttaaatgttctgaatttaagaacctgactttctctgtctgtgggagtatcaactgcagatacagaatgcactcagatctcactttggatttactcaggtcccagtaatgagctcctgtgcaatgcccagggctatgctctgaagatgcaggaagggaagatcttaaactacatgattttggaaggcaaatgtagatacccaccaatctctactacaatgctgctttatgtggtccccaagaacctctgacttgatgagtactgatgggcccccaaaataaactcggggctaatgtcgagcaggaaacaaagtgcattaacctgttgggtaaaattaattaataattatctctctcaacacgaaagaagccctgctaggaatttttatttcactaattttttggagacagaggcttactctgtcacccaggctggagtgcagtggcatgatctcagctcactgcagctcccaggttcaagtgactctcgtgccttagcctccgaagtaggtgggattacaggcacccaccaccacactcagttaatttttgtatttttagtgaagatgggttttcaccatgttggccaggctggtctcgaactcctgaccacaagtgatctgcctgcctcggcttcctaaagtgttaggattacaggcatgagccactgtgcccagtactgctaggaattatcttggctgtctttctgacattcatttgttgtgagacagaggctcacttgtccaaacccaaagaatggactcagagacctggaaaacagcaaaagcgagacttttaatgacagtcttgcaagatcgagtgtctgatgggaaggcacacccagcacagttacaacaagcagtttatcccctagtgtgcaggtccctcccccagttcctcataggctgagaactatggggtcacaatcttcccagacgtcgcctattggttgttgggttggggctttaggtggtttctttaaggttgtcttgctgcattttgttgcagcccacaatgcattacaatcctagtcagctcaggggctctttaagtatctgacttatgtcctaagtagctgggcagctcataagaacagacaaagcaagctattttgcaggctagtaaactttcatcttagactaaacttttttggattaggtgaaggcaactaagggacgggggtggggtgccaacaagcaggcatcagctatccaagcaggggcctagtatatcctgtttttttctgtagtttgctgacctaagccaatttaagtcactttgtcttagaaatggaccactatatacattatttccttcatttgtgaggaaagattattattacaaatagaaattgctaatatttattgaccactgaccttctgcactgcaccaatcttacatatattaactcacttaaattctcaacaatctagtgagggtttactattttgcatcctagataattaagggacacagaagttaaattccttgctcaaaatcttataggtgacagaacaaagattgaaacccgagcactctggatcctgggcataaactcttaaccacccctctcatttcctctgaaaaattaacagattcactcatagtgggcctacttctatttttaagtgtaaacatttttgtcctcagatattttgaccctcataagttaaccatgctaggattttcttgttttgtctttcagagcaaggacacaggctcatccaatgttttagtacactgctacctaaaatcaaagaaataagatcttatttgttctaacaaaagacctgcttcacaatagaaataaaaatggtctctttgttcatttactgaacaaacccaaaaacatatgtttttgggacaaacccaaaaacatagctcagtctagtaaacttctccaaaatatgcatgttatacatttttgagatacctcttgtgttatatatctggtgggaaaaaaaagggagctttgatcatagcacatgcatcaacaaaaaattttcactctaaacctcagtttgaatatggtttaaaagaaaattgtaaagcgtttcctctcccagtgttaaccaaatagaggttgttggaaaaacaatcctgggaactgggtgtgggtctgggccctgaaactagattgcaccagcaccaatttacatgaaggattacataaagttttggacatggtactgagcaattttgccagtttcaactgtccagcatcttaacctcatttccatatttggggacttctgacacatactacccaccatgaaagcctatcactacagcagctgaaatgccagggccctgggtagaaggttggtcacatgacctctcatggccaatcaggttccctggctgggactttgactttgggctgagagccccagctttaattttcactacatttatcatttcatctattgtgtttcctccacagacaaatgtaatgctccatgaaggcagtcaactttgttcactgctgtattcctagtgcctaaaataatgtctgactcataacaagaaaatatgtacaaatacatatttcttgaatgaataaaatatgtcttgttatctgaatcaattcttttaatttctaagatctcaaattctcttgtataatagctgattcctaatttatggatatggtagccacgcttatttccaaaacatgatatttacattaatgatcttctattagctctataagctctgatgtggttttgctgtgtcgccacccaaatgtcatcttgaattgtagctttcataatccccatgtgtcttgggagggagcctgtgggaggtaattgaatcatggggggcagtttcccccatactgttctcatgttaatgaacaagtctcacaaaatctgatagttttttaaaggggagttcatctgcacatgctctcttgcctgccaccatataagacgtgcctctgctcctccttcaccttccaccatgactgtgaggcctccctagccatgtggaactgtgagtccataaaacctgtttttctttataaattacccagtttggggtatgtctttattagcagagtgagaacagactaatataagctctgtttccttgggtattatttcttcttcactgtgactttgtgcctctgtttcctaaaatctttgcttctttgttgtcagagaggggatagatggatgcatgtgcaaagcaaggctaactgactataacctttcccccagcattatgcataataaagatgttcattcattcattctttcatccaaccattgttattaagagaaagacacaatggggcaaaacaagaatattttattgttttgtgggagaatgtgttcaccccttccattttgcaacttgttctcctgagcaaaactctacatattttttcccatagcataacttaaaaggatatttttttagagagtagattatcaccattttgaagatgggaacttccaaactccaaaaaaaacaaaatagtacaaaattttccagacatatgggattatcaaccactgccaatcaccttacagaccaagaagtgttcaagaacagtgttaggcaaatattgccccaatatttaaaacgggtggggagactcatacaatagaacacaatgcttaatattaaccccctaaaatctagagcaaattaacaaagagctattataaagtctggataatttgacacatatacacccatatcccactttacattttactctttaggcagaaaatccctggttgcttctacaataacccttgacatcaccatcatagatgtcctccacttgaaactccagtctgtctgtctgcctgttataaattgcaatattcagaaccagaaatagtattccagacaacatgagagtatggaaccactaatcactatttggatatcaattcatgtctaccaaaatagcctgtgatttcatttctcttttaccaacctctacacactgcacattggaactgctcctgaaccaaccattccacattctttccacatatttcatgaaaaggtaaagacacatgacccagatggcaaacttggtatattcacctagctcttttcctactccacacccttagaaatgacaggagagatgttttattacatactgaaaccgtaagagctgcgccaaacaaggaacagtacccaacattaaccagaaattttgagacaaaaagcagaaagatataaggcagacaggatcaacttgttggagaaaacgacagccaaacacttgtacacttgtagcaggagaggcctgccagagagagaagtggttacagagtactccaagctctcaggggatgggtccaagaagcaagaaggcaaatggggaaaaacaataggagattaacagggtcactgcatttagagcagccacatctcttggctcctccttcctcccgctcttgaattgagtggtgaccaacagcagcatattgcacaggctaaagtgatgagtggggcacttaagtctaagaggcatcattctaactgaacctatggaacctatggcagaaagtggccttatgctcaccaggcttatcttcctttccctgggcacacagaaagactgtatttgccagttttctttcagttatgttgagatcatataactagtttccagccaatggatagcagtgaaatgtaccccttccaggcctggccatacaatgccccattttatgctccttgttcttccctctctaaaagtaaaggatctgtatcagtccattcttgcattgctataaagaaatacctgagactgggtaattttataaaagaggtttaactggctgacggttctgcaggctgtttgggaagcatagtggcatctgcttccagggaggcctcagagagcttttactcatagcagaaggcaaagtgggaacaggcacttcacagaccaaaaacaggagcgagggtaggggagagctgccacacttttcaacaatcagatctcgcaagaacccatccagtaccacgaaaacagtaccaagagaatggtgctaaactattcatgagaaatccaactctatgatctaattatcttccactaagccccgcctccaatattgaggattacagttcaatataggatgtggtggggacagcatccaaactagatcaggatccaattaagatttgtgaggagccctggaaagaggacaatgccccaagatggaaacagccgggatcctaagagtaatcgagagaaaaataaatctttattgagctactcagatttttggattatttcttacagctgacaaattatccaacaaatattatagtgaaagaagccctgagaggatatggaggtaccacaagagaaaacacttacgcagcatctccatcatctcagtcaaggtattgacaggaaattgatggcatgcttgaaggtttaaccaaagagaaatttacaaatggactatttccagaggtaaagatggggctgagggaaccatcaagggatgataaagctcccagaagttagcaatagtggaaaaccatgacctccctcggtcctgaagggagaggagaaggagcagttaccagaaaccagggaggatagtagccacaatagagagtgtcccaccaggagttctcgctgtagattagaaaataccaccactgcctagcccagggcagggaagaaaggaagagcaatactccaacctttcttcctatcctccagcttcagtgggagtctccctttgactggaccagttggaaggctgacggcaagggaagtccactgatgcagagatcagcttcctggggcccagaagaaggcaaattgggacagagcttggacctggaagacaaactgaaaaaaaccagaacatcctcccagcagatcatcatgcccaacccccagtcaccagagataagcacctgtggtcagcactggcatccacagaggggcagatagtgttccaaaagcaaaattgagcagacaacagggaatcaaagacttaaggaaagagaggcataaaagtcaccgtgaagaagaaataataccaaaggaaacataactcatagagcagacagaagaggattgctgtgtcaagttttaaaaatacaagcgtggctacgatatccataaattaggaaacagctattatataagagaagtaaaattagaaattaaaaatttttaaacagacaataaaacattgattggataaacagaattacaaaaagttcatagttaaatggtaacttgttgatctggaaaatcaagccaagggattatttacaaatatgtaatcaaaagggaaaaacagataatttttttttataaaatttcaatatctacctaatgaaaatactagaaatagaaaaaagaaaattttagaaatggaaaagaagaagtaattaagaaacaaaaagaaaatttcccaagaccaaagaaacatttgaattaaaaatgctcatcactttcaaaaatacctgccctttgacatacagttgtaaattttaaaagttcagagctagatagaaaattctaaatgcctcctgagaaaataagcagcctacctgaaatggatgagtgtctgaccagcaccaaatttctctttgacaatacttgaggctaaaagacaatacagtaataccttaaaagttcaaaagaattactttgaatctaaatcctgattcttattcaagtcaacattcaaaaggaaaaacaaaataaagacattttcataaacctttaaagattctgaaagttaacctttcacacacagaccttctctaacagatttaatcaagcaaaagagaattcaaaaaggggaaaatgttgggcccaagaactaacagtatacagagaaaccagtgaagtacactttggaaatatattttacaatttttaacaacaatctgcaactaaaccaaaatatctcaacatgagaggtggtggtgttgggggaataaaggggatgaagtgaaaacatggtaaggttctagttttgtttggggtgtgcagtagaaatagatacccactgattcaaaatattaataaataatctagcaatgagaaaagagatataactctcaatataagatcttatacataaaaaaataagtgctatattaaaaataaatgtgaccatctcaaaaaatgtgcaattttctacaaaactgtaaattaatcaaaattgatcccaaaaaagatagaaaatgtgaatagactgatagactgttgacaaaaagagtcaaactctaaaatatttgaaaagccaaatatgtgtgaccaatggcctgtgacacagccccatgagatgctgagaacatgtgcccaaagtgttcaggctacagcttggttttatatattttggggagacataagacgttaattgatacatgtaagatgaacattggttcagtccagaaaggtatgacaactgaaagtgggggtcataggtggaataaaagattttctgatgggcaattggttgaaagagttattatctaaagacgtggaatgtctgggttaatataaggggttgtggagaccaaggctttatcatgcaaatgaagcctccaggtaccaagcttcagagagaatagattgtaaatgtttcttttcagactcaaagagactattctattcagtctttatatctttgtgctgacattaatgttggtcagctgtgcctgaattccaaaagggaggagggtataatgaagcatgttcaagtgccccttctcatcatggcctgaacttgtttttcaggttaactttggaatgccattggccaagaggagggttcatcagtcagttggggggcttacagttttatttttggtttacaatacacttataaaaattgaaaatatagtcaaagctctaatccattaaaaaacaggtaccaattccagataattttatggagatttctactccttgaagcaagtatattagttcgttctcatgctgctaataaagacatacacaagactaggtaatttataaaggaaagaggtttaattgactcacagttctgcagggctgggaaggcctcaggaaacttacaatcatggcaaaggggaagcaaacatgtccttcttcacatggtggcaggaaggaaaagaatgagtgcccagcaaaggggaaagccacatataaaaccctcagatcttgtgagaactaactctctatcatgagaacaagatgggggaaacagcccccatgattcaattatctccacctggttcctcccacaacatgtagggattatgggaactacaattcaagatgagattttgatggggacagagcccaaccatatcagctagtgataatcttaaattacatgtgtctgaaaatacacaaagttaacttctatactctatccgaatagcatcattctatacagctagcaacaccttgattccaaaacctgacaaaattatcaccaaaaaagtgaagccattggtcaaggttaccatgaacatagatttaaaattctaaaaaatatattagcaaatcacattttgtaatatttcactattttttaaccccggtcaagcaaaatttacctagaaatgcaaagtggttcaatattgggaaatttctgacatagttgactatattaatggatttaagggcaaaaacattttgctcatctcaacgtatgccaaaaattcatttgataaattaacaccctttctggaattttttaaaagctcttagtagactaagaaagggtataaaatcatgtagcctaggggaaaattcatagaaaatattatatttaataatgaaagattagaaatgttgtattaaggtcaaaaacaagacaatcatacctatcatcacagctaccatctgtcattgtcctataggtcctatctaaaaagggattaaagtaaagtaaataagaggtataaaatgcagacaaaaagataaaaatttttctacttctaggcaaattgttaccccaagagaattgactgaaatactatttaaaataataagatcagatacaaaatcagtagctttctaacacataagcaataataaattgaacacctctcatattttcttctaatacttttagagttttgttttttacatttagttctttaattcatctggaattcactttggcataaggtataaagaaggaatctaagttgaacttttagaacttctaggaatattattaataataacaataaatgtatacataacacacctagaaataaccctaatgaaaaatgttccagaactaaattaaaaaaaaaaaaagaaaacctatacaggagtggttttgtcccctgggtgcatattggaatcactataagactaattaaatcagagactctagggaggagatccaggcatgaatatgtgcagccaggattttaaatctctgttataaattgtaatgatgtcattttttaataatgcaaatgcagtaattttggatggaaaaacaaaaaattttaagcaggtcagttctctccaaattaatctgtaaatcctatgcaatctgaatcaacattcaacagaattttttatggagctggcaagttgagtttaaagttcatcaggaagaggaagtacataagaatggtcaaatgctttgaaaaaattaaaggaaactcctgttaaatatcaaaacatactttaaatctgcattatatgtctcataaatccactaaaatagaaagagacaaaccaatgaaataaaataaaacagtacagaaacagtccctgatatatatttcatttttataaggcttcaattcagtgggaaaaggatgggtcactaaataagttgggttgataccattatatatttcataagagaaattaagttagactttcctccctcataagcatactccaaaacaaattccagatggattgaggagctaaaaaaaattttttaactataaatattaggagaaaatacagggaatttataacctatgaacaagtgttcctaaccacacccaaaccagaagctccaaaagcaaaaattgaaagatgttctcatgaaattttaaagcctttataagaaaagactccttaagcaaaattaaatacaagcaacagccttgaagaacatatttgcaacaattaacaggagtggtatctagaatatttaaagaattcatgcaaattcataaggaaaaaaaatgtatgtatgcatatatatatatatatatatatatttttgagctaaggcctctctccatcacccaggctggagtgaggtagcgcaattttggctcactgcaacttctgcctcctaggcttcaagtgatcctcccaccccagcctaccaagtagctggaactacaggtgcacgtcaccatgcccagccatgtagagacagggttctgtcatattgcccaggctggtcttgaacccctgggctcaagctatctggcctcccaaagtgctgagattacagatgtgagccactgtgcccagccaagaaaaaaaaaaattaagcaggaaaaaattgtttaccagaaagtcttgaaaatatatatagatatatatagatatatcacacacaaatatatatacccacccatacacacacatatgcacacacacacacacacacacacatatacacacatacatactcacagggccaaaagcaaatgaaattatctgataaccaggaaattgaaaattaaaacagcaataacacaatagtctcccatcaatatggtaaaaacttaacagactgataaaaaagcagtgttcacagggatgaagaaggggagaaatttccccattcacgcattcttggtgaaagtacaaattggtaaagcttttctggcaataatttttttaaaatcacaatcataacctttgagtcaataatttctaaagaaatatacctatgtatgtgctgtttatataaagatacttaggcaacactgtgggcaatagaaaaaaattaaaaacatctaataggagagcagtttaaaaaactgtggtcatcagtttaaaatattgggctcttatacatgatgaaaaaaataaatcatagaatatttatagtacgctatcacttgtttattaaaacatgtatataagtacagtctacacatctctgcaggtgcaaaatctgcagagaaagaactggaagtatagtcacatcctttcactttggctgtcaggaatgtaatatacaaatgttttagcacatgtcaaactgaactgtatttatttgttttcatgtctgtcccccctctaagctaccactttttgacagactgtcttttttctccacaggcagtgctctataaatgtccgataaatggctgcatggttttcttgcccttggacctgtcccactcaacattttagaggttcaaagaatgatacaatattcagtttgaaactcattatcgccatttactacttgtatgaccttgggctgttagttaaactcattgagccttagttttcccatctattatgagaagaaaataatgcctaagtcatagcatcacttgaaggattaaataatcaactatataaaaagttgctagcacagtgcctggcactgctatggattcaaaacaaacccttccaaacttagtggcttaaaactatgactatgatttaacatgcatctaaatctgactttgggcagggctcatcagggacagctcatctcggctctactgctataagctgggacatctggattggtgtgaaggatcactcccaaggtggctccctcacatggctggcaagttgttctgggtgttggaccctccccatgaaagcctctccacaaaacagcttgggcttcctctcaacatggtggctggattccaagaataagcctctcaagagatattaataaagtagatgctaccagtttcttaaaactaaggcctgaaaaatggcacgatgtcacttcaccatatgccattggtcaagcagttagagagtccagatccaatctgcctctggacaccaattattgacatccctctagcatgcaaaatgcatttatgcctcccaggatcctgcaaacatctcaaccctttaaatcctgtccaagtggaaatgaagctccctgagagtggccctttgggtacaacatattgagtactgttcatcaccatctgactattaggaactaaagaggcaagttacctttactgaccaccaccccccagacacacacaaatacacacacacactccacatacgatagtggaataagcagaggataaccacaagagacactcccgttaaaagggggaaacagaaggcacagagctggcaatggcccccagagcacttctgcaatccagctccataggtgttgcaaattcctttctagagcctagtactctccaatactcttggttgtaccctctggtctcctgtttctgctcctgaatatcttcctcttctataagaataccgagttggtgattttgtcggattttcagtctacttcctgcttctagaggttggagctccatctctgtctctttcaatctaatcaggtggtgcttgcagtcaatagaggctattattattgttattaataacatgaataaaaatataaagatgccttacccaataggtaatacttaccaatatttttggaggacagaattaaattggttaaacccaacaagatgaaattgggtaagagtaaataaaagtcctgcatttagactttaaaaatcaatttcataattacaggatgaggaggctttggcttactggcatgcttacctcccagactaagctgtaagcttttagtgggagaaaattggggggatttagctgacagcaatctcacaatgaaacaaaagcatgaagagacacacactgtaagtggcatcctgacaaagctgcttgtgctcaggatggtgaaggaaataaaaccacatcataggagtaactgtggacaaaatgagtggctttgcctggagaagagaaagccttagggaagtggtagagcaagttatcaacttcacgtgtttgaaaggctgtcacataaaagaagaaatggactttgctccagaggacagaaccagcatggctaggtggtggtttcaggagagctaactttcatcagaataaaaaagcgtttcccaacacccagagtccttgcgctcaacctcagttgtcctactggcatcacctgaagaatgttaaataatatggatgctcaaagacctaaaaacagaaatatcatttgatccagcactcccgttactgggtatatacccaaaggaatatacattgttctattataaagacacatgcacacgtatgtttattgcagcactattcacaatagcaaagacatggaaccaacccaaatgcccatcagtgatagactggataaagaaaatgtggtatatatacaccatggaatactatgcagccataaaaaaagaatgagatcatgtcctttgcagggacatggatagagctggaggccgttatccttagcaaactaacccaggaacagaaaaccaaataccacatattctcactcataagtgagagctacatgatgagaacacatggacacacaggaacacatggacacacagaggggaacaacacacactggggcctataggaaggtgaagggtgggaggagggagaggatcaggaaaaataactaatgggtactaggcataataactgggtgattaaataatctacacaacaaacccccatgacacaagtttacttatgtaacaaacctgcacatgtaacttaaacaaaagtttaataataataataaacttaacttaaaacaaaagtctaataataatattgatgccagcagcttccccaggacaattctatcagagtcactgaggatgggttgcaagcagtaaagattttataaaatggatcaggtgatgacattgtactgccaggattatgtacattgaaaggacctaaagcaaatatcaataaatgatctgctcacaaagaagggacttagccaaccacaaaaaggtttaagcaagtctgagtggctgtcagtattgttactatagagaagtcctgtatcaagtgatcaggcagatgagctttagactccagggtagagaatgattaaattccactgaacaacagaaacagcccagagattcctaatgcagagggagccgtgccatgttcagaccatatttcttccctccaccccgtgccaactcagtctcctggaaaaagaagatggaaccagtcctcagagtggatttctttgtccaaatggacagtttgagtcagggaaccatttgtttagaatggctaagaaaactgaaagtttagggtagagcaaggggggaaagggggtaccccaagcccctgacatgggtattttcatttgaagttctaagaccttatttctgcaaggaggctcttctatctccctgacttctacccattgagtccccaacccaactccagctctttatatcaaggcaaattattctctttctcatcacattctgttcaactgtgtgcagatagctcgtgtttcccaccatttgctgttgctaagtcaaagtccacacaaggtatttagttcttatgaatatacatcagagcctgcagcatcaaataccagattctctgcccttctctgatctctctccagctctgcttctacacctttctattactgaagtcccacaaatgtgttaaaatatcccagctgtgctaccagcagcccagaacacggaataaaccatactgatcttactcttgaaaaaactgtatttcacgaacagaattcttcctcattgttttatatcgtaactgtcattatgagagaagacaccactgcagccccacatcccgtgatccaagggcagatacctagcacatatcaggtgaatatcttgtttctccatgttaaattgtgcttaattgtttttctatttgcaaacataggtctccttcatactgggcattgaccacaatgggtggccaaaaagagagaagattttcttgaatatgaatacagatttaagcgggagaaattgttataaatcatggcactgtcttccaaaggccgagtgcacagcataaaactttcccggttcatttcaagccactattgagttcatcaatgctttatttgtgaaagtaaattcttagccttacaaaacatctattcaaacatcaatgactcagaattctgggactttcctgctagtctggaaatcatgtttatgatacaagtgcctagttaataaaagcctgccttccatgcgtcaaagacctttatgatcttaaagaaagaaaaagtggagacgctgcactggctgctttcctttgtccttcttttgctatgtccatgatgtttgtgaggttttgttgcacttaaaattaattggtggatatttggggcagcgaaactatgctgcatgagactgtaatggtggatctgtgtctttatatgtttgtccaaacccacagaatgtacaatgtggagggtgaaacttagagtaaaccacgggctctgggtgatggacatgtagcaatgcaggttcatcaattggaataaatgcaccactctgatgagggatgtttctagttggggaagccatgcatgtgtggggcctgaggtgtgtgggaaatctctgcaccttcctctcggttttgctgtgtacttaaactggtctaaaaaataaggtctattaataaatagataagtaaccaatcctgttggaagctggccttgctactgcactcacaggctcttaaaaatttgagggagaatgtttcccttcaaaacacaggaaaagtgcaggtaggagcatcgtggaaggccacctttggaagctggagatttctggagaggttgctcctcccttaggatgtttatacctgctgttctccttacctagaaatctctttccacaggttttgagtgactgattctttcctgtcatgcagaactcaacttatttattttttttctttttgagaagagtcttactctgtcacccaggctggagtgcagtggcacaatttcggctcactgcaacctctgcttcctgggttcaagccattctcctgcctcagcctcccaaggaactgggactacaggctcacaccaccacacccagctaatttttgtatttttagtagagacagggtttcaccatattggccaggctggtctcaaactcctgacctcaagtgatccacccaccctgacctcccaaagtgctggtattacaggcgtgagccaccacgacccaccagaattcaatttaaatgtcatctcctcatagaagccatccctgacaacggtaaggtgatgtatctgccaaaatgagcaaggagagagagactgtggtccgaaggattggcccccatctcagcctctctctgtgtctatacccttgcccagcctcatcgtgcaaagaatgcattttatttccccttgactttcagcttggccatgtgacttgcttcagctgatggcatgtgggcagaaggagagtttgccagggcagcccagacctgaagcagccttttgttttcccatttgcctcccaaacctctccaccagaagagcatgccactgctaaccccgtggttaacctccaaccccaggcagagaatgagcgatgcctggagcaggaccacccagccacacccaccacgggtgtgcagccacaatgagttctcctttgcagtcactgagttttggggtgctactatgtggcatgatgtgacaaatgatataacaggcgtgtggagttctcttcataaagagaactttatggcacccagcaagcatttgttggccatttatcactctccacatcagtcttgcaaccccttttgcattttgaaattacagatgaagacaaagaataattagcaagtgctcatattgcttattatcgtaacatctgtcatatttatatcaaattattctaaatgtgcaaaatatatgttacccatgagattgaaatatgccctgaggtcagaaactccactgtaacccactgaagatgagccagcaaagtccatcaaggctgcctacttggctctctatgcttccccaacttggtgccatgttgtccctggcactaaccttacaggaggttggtagagggtggaagagaaaggaaggggggcaaaggacaagagagaagttaagaaactgcactgacacttggttggaaccaacagaatctactccttacagggacatcacgtcctgagatatttatgactattgcacaagagatcaaacgtcatcatcctcttggggaaatggcttcaaaacccatgaggcagtttataagctctgaaatctcctaacaaatgaatggaaaatttctttggaggttccatgatttgtctgccaactcccaagaatacgcacatacaggcacacacagctgcatccagaccttccacctcttgctgctgtcaactttgttagctgagacaggccaagacatactcaccagccccttgctgagatgtgactcacctctcataccctctttcccaacatcgtcatcaatgccacctccccttcccacaggctactcctcaccaccaaaccaccagaaggtgtacagtggccacagccatggtgagacaccagcagactcccacatcccttgcggatttatttggtttcatcgatgcattagaccacacatgggaagaaaatgagcaagtgcaagagaaaggtttctttgatcctaaatctggaaatgaaatatatttacataaagccatgaaaagccagaaatggccaatgagaaaccacagcttgactctcagagttaaacaccattatcaagcttttgtatgtccttaatggctcctaaaagctccatttaaaaacaaaccaaaactctggccagagctgaagagactcttacaatcagtgaggcctgggcctgggtgagatccgtcaagcttgtaaacctctcattccacccctcaccactcccctcacccagtggcattaacacccgtgagcttcacccatacataactcagctcagccactcttattatcttggcagcctccgggagcctttcgccaaggttctgggctctttcagtcaacatgaccaattccacatccttttattaattactaaccatttccccttgtagtcagccctgaaatccctgctttgatctgcctgacaggtcacatggtgtgtgcttctgaacacaacccctcccatggccgacttcgaactggcaagcctggcagacatacacacaagctagaaagacatttcctgtagatacaagaaaaagagggagttctaccaggaaaccaatggccacagagaatttttgttaattcattcttatatataataaatagattatttattattaataaataatctatttattaattataataaataatctatttattaattataataaataatctatttattaattataataaataatctatttattaattataataaataatctattaataaataacttgtttattaattataataaataatttattaataagtgatttgtttattaattattaataatttattaattattaataaataatttatttattaattattaatgatttttaattattaattaatattaaatttatttatttattaatagcctgttggtatgtatttaagagcaaaataacagtggctgtcaaaaacaccctacatcctgtccaattagagagaccataacttatttagatcacaaaaagaccacgattctgaaacctgaagtctaatgagctgaattatgtgcttaacggagaagactcatggatgagccctcttgcagcttctgttaaccttttctgaaggcactgggtcctccacagatcctgactgcaggcagaatggctggaatgatgagatgcctgtcttgtaaccaagaccaggacataagcagatgccattcatccagacccactttcttccttggaccactgtctatataaacagcctttctgttatttccagtgtggcattacaacaaaccagacacatttttcagggcacattgatctatcccaagggtgtaggtctattaattccctcgaggctgacagtggatgcttccagggaaatctgaaggcaagcacacaactgaatttaatgaaaatgattgattttttttggtccaccccaagtatcaaaaagaaaacaggccaggcaaggtggtccgcacctgtaatcccagcattttgggaatctaaggcaggaggatagcttgagcctagtagtttgagaccagcctcggcagcatagtgagaccccatctctacaaaaaaaaaaaaaaaattaattagctgggcatagtggtgcttgcctgtagtcctagctactgggaaggctgaggtgggaggatcacttgagcccaggagtctgaggctacagtgatcagtgattcaatgattgcaccactctactccagcctgggcaatatggtctctgtgaaaacagaaaataaaaaatacaacaaacagccattaacagactcaaattggttggcaagagtcagatcccacatcagctaaaattgccacatgatataaaacactaaataataaatgtttacctttattaaacattcagaccatttctggttaagaaaaccctgaacctttttcactgcatggcttaagatgcaggtaagctaaccatcatccttcctttctcttggcaacacttacgcatacagatcggtaatgcccgtcccactgcaataaaaaaaaaaaataccacatcgactctacatctgctgcaattatcgtctggtgtgaagatcaaaggggccttttcccctggcagattactcgtctacagttccctggcctgtcagtgtggtctcagctgctcccacttgtcccattgctgctcaggaatcagcagccgcctagatcttccagctatgtgactgggctcataatgacagtaattgccagtctgttaagtcacctccaaccaaaaaggaaaatgccttccagacacacttctcaggcccatgtgaagagataggaatgaattcataaaagaaaattatccagtcctgtttatacaatgccactatgaccaacaggcttttttcttattaatggctttcatttctgggccacacagtggaacaaagcgcttatatgtccactccttgagaccattaagtccttgacttgctttgaccattaagaagcccaaagagaggtgtaggtctacccttgtaccagttcctctctccccaaagtatttttggggctggggttgcctttgggattatacttgcccagaaaagagaccatctgggttcttatctgcaatgggagctacatgagatttaagctacgttccttctcatttcctcactacttttctgtttacctttgatccttgttggttattgtaggaagacgtgattggtatggcaatgggataatatgtatgacagtttcagtcttattttcccagtacaacatgccagttggataattcctctgagtaaatattaacatgaacattttcaatataaagcccattagcatccacaaaactttggaattgtatgtatatgttggattatactttcacagaggtggatttaaagaggtgaaattttggctgcaataaaagattcattcagctgggtgtggtggttcacacctgtaatcccagcactatgggaggccgaggcgggtggatcacgaggtcaagagatagagaccatcctggccaacattgtgaaaccctgtctctactaaaaatacaaaaattcgctgggcatggtagcatgcacctgtagtcccagccactcaggaagctgaggcaggggaatcccttgaatccaggaggcagaggttgcagtgaactgagatttgtgccactgcactccagcctggcaacatagcaagactccatctcaggaaaaaaaaaaaaaaaaaaagattcattcattaatgtaatcagataatgtacacctactttaaatgtatatagaatatatccttggaaacacttgtgtgctgcttgaagtctcttattctcagctccactctctctcctttctcctcccctgtgacccaggagcagaaagcctggaaactacattttccaaatccctcttgccaatcagcctcttgttagcttctacaatgggaggcactagtagcaaactggaggtggaagcaagggagatgctattttttccatcttctggtagtgcctctagagatggtggtggcagcagcaaaggctggcaagggtggcttctgggattctgctgggtcagctcagtgttaatagcaacaatcttggtggatcagcaagcatcatgttctctttggctttcaagcctagggggatagtgacttcctgcagttaccaatctgtaagtaagcttgactccctgtatttactccttcgttcctctcaaatcatgcaccaccaatttgtatgaaattccttctctgaaatatttacagcggtttctagacagaataatgcactgattggacactgactgataacttatcatgcaaataatttatccccacacactgtatttgctatgaagcaaatgttaatcagatggttaaagatgatacggtaacaataaggtcatttcattcagtctccaaattcatggcagatgggcatggtggcacatgcccatagtcccagcattttggtaggctgaggcagatggatcacgaggtcaggagatcaagaccagcctggccaacatggtgaaaccccgtctctactacaaatacaaaaaaaagaaattagctaggtgtggtggtgcacacctgtaatcccagctactcgggaggctgaggcaggagaatcgcttgaacccgggaggtggagatcacagtgagccaagaccacactactgagtgagactctgtctcaaaaaataaaaaataaattaaaaagatgatatggtaatgctaaggtcatttcattcagtctctaaattcatggcagatgggcatggtggtgtacgcctgtagtcccagctacccaggaggctgaggtgggaggatcccttaagcctgagaggtagaggttgcagtgagccatgattgcaccactgcactcaagcctgggcaacagaatgaggctgtgtcttaaaaaatacataaataaacaaattaatgccagaattaggaaggaaaatttaattacataaattctctaagactctataaaacagccagatgagtggtccaatcccctttccaaatagctttggtttcaattttatgtttgttggcttggggtccgtccatctgggtcatgtattgggccagtgtgggatctcaggcattgttactgggttcgcacggctgttccctaacctaacatggcagcattagatgccagcactttgatccatgcacacacacaggatatagacataagagcttcccaaaccaactggaaagagtcccagtgggaatactccacgacatattcatcaaagtcaaatgcagagcaaattgacctggctcattaattatgaaaattctctcacaaagtgacatgttgctaactatgtggaagcttagcacattttcacgtggttctttttgtctacttggatccaaaatgtcacatttagtaatgcgttgaggttttcttttccttacttaggaagaaaaagctattttatgccgaacccacatctaaatatatatactcgtgtgtttacatatgcccactatgtggatagaggtagcctgttggtaagaaggaagtttgctatgccagaatttgttttacaaagatatatagaaggaatttgaaaaataaatgttgattattttaaaacccttgaatctatgttgagcgcctgtcccccctggactaactgggcaaattcagacatcatatgaaaacctggccttatttctctacatatgttggctaaagcagtgaaaagaacatgggcctctctccaccatcactgaaaggaatttcagttccttaggtctttcatttcctctctcaaaatgtaggaatgagaactttcagaagctcacaaaagttacccttctatattcaggccttttatctaaactgagatggtcattatgtactgcttgacttttaaaagctcctaaatgtggccaggcacagtggctcaagcctgtaatcccaacactttgggaggctgaggtgggtggatcacctgaggtcgggagttcgagaccagcctgaccaacaatggagaaaccctgtctctactaaaaatacaaaattagccaggcgtggtgggccatgcctgtaatcccagctactcgggaaggctgaggcaggagaatcgcttgaactcgggaggcagaggttgcagtgagccaagatcacgccattgcactccagcctgggcaacaagagtgaaactccatctcaaaaaaaaaaagctcctaaatgtgcctactgaatcttatgacaatgcctgatcattgaaaatcctttctggatcagttaggttattagtttggctatcattaaaaaaggtcaaagtaacagtaacttaaattgataatagtttatttattttaaatatggtctaatcataaatattcaaagtgttataacactccatagtatcagagttcccgctcttcctgtcctgctgttctgccatccaaaacacatagcacgtgcatacctgtgcatacctaagcctgtgcatagaggccccacagcaactctgcacatagccctcaaggtcacatcccacgggccatgtggcagttcttgctgcaagggaagctgggaaacataacctttgttctgggctgcattggactcaactttactaaaggaaagggatggctgagaccagccatgtctgccacagccttcttttcattaaggtgcagcgtttccctaagtattggcacagagaaggcacaaaatagatatgtgttcaatgaacaaataaacaaatgaataaataaaattcttcagggaatgcttatctgaaaacagacatgaaaacagtttgctaggatattcacggttggttgttttcatcaatttctcagaggagaaatttagtttttattagatcattaaatcaatttaaacagacatatatttgtatatcagcatcaggaagagcaatgtaaatgtcctacgggtgacatcatcatattcttccccagcatttctcaaacctatctagccatggaaccctttgtcagagaacatttactaatgatttacaagacattcatgaaaaatactctcctgcctaaaatcttagcagaaaaatagaattcagccatttatccacttaggataggaccataaagaagtcaatatacatgtaaataaactacatttttttaaagcaacaagagagaagtcttttcagcacatactattaacagtcccatagtatcttccaatggctgtgaataactagtaggttgacctgccaccttacataatgtcttcatctccccagtaatttcccaataatcctggagtactggaaatggaagacaccttaaaatggtatcaaagccattcgtcggccttcagatcctaatgtcactaaactaactgagagaaaccaacatcagagcaaaacctcatgacatgagctcattcctacacagggtctggaaaacatcacttccactttaagtacacactaaaaaaggatgatgattcagacagacaatcttagctgcactgcgcgggtggacaaggggattgtaaccagccatccaggaaatctggcatctgtccagaaaacaagtctaaattttgaaaggtctctgcctaacacattcagtttatgtccacaggtctctgaggaagtgcacttataaagaggagatgactacgttagaaattatgactgaggcagcttttgcgctgtaactcttgcttaaaagggaagtacgccagttcccctttgaaacagtttctaagcagcaggtggctaccaccaggaagccaggcacacgatgcagcagtattgatatctggctgtgttgtacagatcttccctttatccattcgaaggatgtgaaagcgagggcagagggtagaatttttagctggtaatggtctcttttaatcaaagaactcaataaattacaaagagactgagtcacttgtcctgtctcaaagaaatgtcataagaatagctcagggcagtaaaggaagtttaattaacgcagccgggtgtggtagttcacacctgtaatcccagcgctttgagaggccaaggcaggcggatcacctaaggtcaggagttcgagaccagcctggccaacatggcaaaaccccatctctacttaaaaaaaaaaaaaattagctggacatggtggcacatgcctgtaatcccagctactggggaggctgaagcaggagaatcgcttgaacctgggaggtggagattgcagtgagccaagatcatgccactgcactccagcctgggtgacagggtgagactccacctcaaaaaaaaaaaaaaaaaagagctcagaattggagaacatttataagtagcttggtttaggggaggacaaatgaggagaaagccgatctaaaataggttgggacaatctattagccaactatctacactctcccaccatagttttcattattgcattaatgaaagctgagtctccagaaattaaaaaagactgtttctcaacctatctaagctgcaatccgttttaatgaagctaagtatagagacagagggaacctagataataatagaaataactgtgctaatgtttaaaagaagaaaagaatgaggttaaggttaattgcagtaaataataatgaaaaatgtgtgttattcaatatagtcactaaaaggatgaaaatattttcaaatatgactcattccagttgaaacaggaagggaagtaaaagcatcaacatctgacaagacattaaactccctaagtcagagcagcgctgcccctgtggggaagaaactatcctcctcccaatggcacagaaccaactcactcaagccaggcgcctctggagaaagtcactgaatcacatatgtgtgtgcacacacacacacgacaatagccagccagagagtgagaaagaaagagggtatactgacccctaaaggaccaaggcagactgtagacatctttcaagaaggaaaggaatgaagaaaaaaaaaggcaatagataatttagctcaaaatcatgttgggagagggttgaccagttcttggacccagggatcttgagagaaagagtagatgagcccaaatgtcctcagtaggcacttgaggtaaggagccaagagctgacttagaaggagaaggaaggaggacccacaggaataataaagcaagaaggagagcacttaaatacaccacatgtcttcaaattcgcaggccctagggatttgtaacttgttacaaagttatttctgaaggctagaaaaatgtacagaaaacatatgctgcttcaaaagtgggagtggagagagtgggagaaagggatgacctgcttctgtgaataaatgttcctattgtaattccttaactggcaaagtacttttgtgtaaatgatactttgtaaacccataggcagaaacctagctgagaaataatcagcacaaataggcagagtacaaatgcgtatttatgcaactttctcggttttttatttcttaaaaaaaagcactaaacttcacatttacagaagaatgaaaggcgtgtcatttgttttaattttttaagatgttgatttaatctaatcaagattttggtgcaagtggaatcaactaccttaggaaggcagatagaattagagtcttgatgtgcaactcaaatctagatgtttcctcctgactttcccccagctcagcctcctcatccaactgccattggaccctccaccttcccagactgaactcagtacttccccttccttcactctatctcctcttccattttcatctctccttctcctctcaaccctcttgcactctttcctagacctcagttaatgaagtcggcatccatccaacctccaacgcaagcaatattttgaaaaacccctgcttgaaataaatgtcacttccttcacttatagaataaaatccaaactctcccagcatcatagagaaaagttcttcacatataagtgcccatctacctttcaaacctgtctccgctccttaccctatgctcccaacacacccaattatcctccaagcccccaaatccaatcacattcccttcatctggggtgccctccaggtctttgcccggggaaatgctatccactccaagactcagctgaaacaccacctctctgtgaagacatccctaactccccaggcatagtctgtacatctctcttttatccctctatcgccttgggttaatataatagtgtttcccctgtttctggtaattgatctgtttttaagactctcttcctgagtggaaagcaagaagatattgccttcatctttgcatgtgagcactaagcaccttggtcaccttacctaaagggaacacgcttcctgctatgtttttctccctagcgctaccatatacttgcttgtttacttgtttattacctgtctccctccactggactatgaactacatgaaagcaggtatttttgtctattctgctctcctctgtagcatcaatgccctgaataatgcctggcacatgataggcacttaatacatatttgcatgaacgtggatccaaaatgacttagaacagtgtctaacacattcaacatacaagtacctcctactccctagaatttttctcagtattcctccaattctccctccacctcctctgcattcctaccatgactacatgaggttccacaatacttggcatttcatccattaatgtattttaatcttgtctttctaaggagattataaaaatcccaaggacaggtgccacgtcttttaagaaagtcaatgttaagtataactcatgctaggcacttccatgcttattggatcacttaagtttttttcccaaacatcctgcaaaattattttagtattccaggttgacaaataaactaacagaggtgcagatctacctaaattcacatggcctttaagtagctattcaaatcggttttgactctaacttttatgttctttccagtacttcacaccgcatctgttaatttagctctggctgggtgcagtggctcacgcctgtaatcccagcactctgggaggacaaggtgggtggatcacttgaggtcaagagtttgagaccagcctggccaacatggtgaaaccctgtctctactaaagatacataaattacctgggtgtggtagtgggggcctgtaatcccagctactcggaaggctgaggcaggagaattgcttgaacctgggaggcataggttgcagtgagccaaggtcacaccactgcactccggcctggacaacgtgagtgaaactctcaaggaaaaaaaaaaaaaaaaaagctctgttagggattgaattgtgtccctgcaaaatttatatgttgaagccctaacccacaatatgactgttagataaggcctttaaggagataatgttaaccttttaacaaggttacatgaagtcatagggtgggcccctgatccaataggactaatgtctttgcaagaagagaaagagacaccaggaatgtgtgtgtacaaagaaaaggcagccacctgagagccacagggagaggccccagaagaaaccagccctgtcaacactgtgattttggacttctaaactccagaactgtgaaaaaataaatgtctgtcgtttaaccacccagtctgtgatattctgttaggacaaccctagaagactaatgcaagcccattgttaaatttttccaaagctatagaaaagccaaaaggagaaaaacaatcacccacaaactcatcatccaaaagcaatcactattaacatttattctatgatctggtcttctttaactttgcatatttttaaataattgtaattagactggaaatacaaattggttacaccagcttttcaattaatattcttaagtttgtgtaccattttaaaattaatattataatgatatgacaattactatttatccataaggagaaactttttcacgtatttttcaaaatgttttcccttgtgaaaagaagaaaaaaacttttcccttgtgaattgtctattctttgcctactcactatttccttgcacattatataaagaatattcttttttatccattttttggaatgattttctatgctgtttctcaattatctcacccagtaagtacctaccattgtgctgaatacaaaattagtgtgacccaatattgatgatcaatcattaaaaatcattcacccaaccgaatgatcaaggttaacatcagcggtatgaagtcatgttgacatcacatgcacctgccatgaggcaatgaaaagggcacttcatcttcatggtattcttcccagaaacccaaaaccctggtctaatcacaagaaaacatcagacacatgcaaatggggaacattctacaaaatgtctaaccagtcctcttgagaaatgtcaaggtcgtaaaaaacaacaaaagactgagaatctgtcacagattggagaagactaaggggctgtaatgactaaatgcagcatcgtatcctggattagattctggaaaagaaaaaaagtcattagtagaaaaacaaatcagaataaagtctatcgtctaattaatagtattgtatcaatgttgagttcttactttttataaatatgccactgttatgtaagaggttaacattaaggaaaacaggtgaagagtatacaaaaagctctctgtactgcctttgcaactcttccataaatctaaaatgatttcgacattaaaaggtgggttttgtttttaatgattcactctggatgcataactagtggcatttcacagacaatcgcacctttatccaacacaaccttaaccctttcatcaacaaccttaaattacaaaataaaagaagtatttattgagttcataataaattagaagatagctaagacccagaaacagagattacgtattgagtgtgagtttgctgagctaaaaaggagattgacaacaacaaaattaggtccatatgacaggtcaaaatcatgctctctaagcagaaaaagtggaccacacaaactaaagacaagttcccccaaggtggcatggtatgttggaaatatcctggttctgaaattgagtcacacaactgccaatttcctgttggttaggaaccttaggaaagtaaataatcttccagagtcttggtttcttcaaatttaaaactgaagtggtaaggtttattttatgaaactgtggagtagggggtcaatcaactttttctgcgagttaggaaatatttttaggctttgtagatcagacggtctatgtcccagccatgtaactctggtgctatagctcagaagaagccacagacaacgtgtgaacatgcggcctgggccttaaagaagaaagtagctggggagtaagtagaaaaaggaagaaattaatagcttccatatgccacagaattcacccaatgccatagctgggatcatgcaggaggagcactgtggtcagagatctctatttccaaatgtgaatattgttcacagaaaggatatgctatcagcactttgggaacatgacagctgtaacatgtgtttgctgtgttatttaaaaatatttagcacaaccatagaagacaatacaaataaataagaaggatgaaactcaaaggatatattacttaaccgtaatggctaattttatgtgtcaacttgactgggccagaaggtgcccagacatttggttaaacattaccctgggtgtttccatgaaggtgtttttggaggagtttaacactgaacttagtagactaagtaaagcagatttccctccctcatgtaggcgggcctcatcccatcagtcaatgccctgaatagacaaaaagaccaaccctctcccaaggaagagaggactcctcctgcctgacagcctttaaactattgtcttcaatgttgaatagaaacattggcttttcctttctcaatggcatggtcacagacacactttcaaaccactacattgtgattcttttattagaatgggaataaaatgtgtccttcctggtgaaagaacatagttacaagggccatgccaaaaacacttccttgagatccccaattgcaaatcaggtaaacctcacatgtgtcacctgcattaaacccaccagtgattggaggagagtgtcacagtgagcaatggatgtctttagaaacacacaggcggcctctcacggatgtctccaagtgatagaagatgctataaatatacacgagggtatgaaaaagcagcctttgctgacagaaaccctcagggttaagctgtcagaaaataaatgatactggtataaggcaaggagaacttgtttgcaaaacagaacaacctgagttttccacctctgacatggacttatctaaaaagatgctacatgagaaatacttccgagaattctgatagtatcctaatttcagagacccttgatccagccatgagtttataaccagaagggtgaagaactcttcctgagaaaggttgcattttgcttctatgtcaagaagccattcgtcctccctttaattccaattacagaaattcatgctaagaaatgaaacagagatgtgagaacaatgcatctgtaacagtgtttatttcagcatcatttctgaaagaaaatttgaaacaatatctaagtgtccattgatagagaaatgattaaatattaatattaaatgattaaatatgattaaaaatgcagcataggcaaaaggtagaatagtatgttgctgtcaaaaatcagtttttgaagagtaatgatctggaatacagtatgttcattacataatataacgttaaaaggaggatgtaaagttatacattcaacatgatttcagtttgatctctaaaatggtaagaattcttgttttcataatacttttctgtattttccaaattttctacaatggaaatccatgacttttataatcagggggaaaattattattcaaagaaatggatttgtcccaaagaaaactcccccttttcagtgacagtatggttccaatagcccagcacatggataagagaagtgactacaataaagattaccatgatcccaacctctaaaacattctctctccgtgcctcctcagcaaggtatcctcctgctaaaggcagtgtctacacccgtagggggaatactattacagacactctagagaaccaggccaacagtgacttttcagttacattgacggctcaaagtttgaccacaaagcagcattagcagagtgggttctgtctattcaacaacagatgatcctgcctcccaattatcacagataagccattcagcaaatgcaccatcaacccaaacaatacttgcagggttctagcactctgtgcgatgagtattcaggcgaacggctaaagttcgtgtctggctaattttaaaatgtgctgactataaaattttcccagtattgccagtatagggaagagcacctctctaattaaaacagctcctctgttctctgtttcttctttcaatgacttaacattaccatcgccagctttgtcttaggtgtacaacagtctagagtacttgtaactgatgcccagtgaaagggcaaaactgagccgttcaaatgcttcacagcctgagcggttgtgtctgcgtgcattaatgagcatgcatagtaatggagatttagcgtggatacagagggacatctagtgaccagctaagtaaaaaacacagtgcagcctgcaaactacatggaggcggccatggatccttcacctaaagttgtgctttatttgatgaataagtattgaacatctattatgtccaaggcactgcactaaatttaggggttacaaagaacaagacaaaaatccttccatgagagacaggattttccataatttaaagctgatggaaaaacatctccttaagtaatgagtaatttttctgttgtctctatttatgaaaggcaaaacgaaatttcacactcaaaagagaacatccctcaaaggaaacccaaattatttgctttcctattgtaagataattttccaaaagcactagaaataaagtaatattctatgtcagcaattccaaacttgcaatacatgcaacaagttttttctttgatttgtgtaacaatttcccatatttcttcccgaacccaaagggatgagtattatagaacagtgctctcaaaataaattaaaacaaacttagccctgataattttagaaattaactttatcctactctttaagttaatcagtcccaacattaggctcacaaactaaccaaaagtaaatacaaaactggaaaatgctgaattcaagccccaaaactactatcaaagacacgaaagcaggaacttttctcacctaacatccaaaggaatctgtgtgtgtgtgtgtgtgtgtgtgtggtgtgtgtgtgtgttttaatcctttactccccaccaccactaaaaaaatattaatatgtgaaagttttggaatgtattttattttgaatatcataatgttttgcatacataaaatggcacattgcaaaccacactatcatgcacttcttttctgttataagaggaggaaaacaattaaatattgctgtacatggagcacgtcaagaagtttgtgagcaatcctagagagggtcgagtgcctttcttctgggaagagccagtgacaacccaaatcaccgggtcatgtaagacccatgaaagtaaaagcaactcaactcagagtttattttatttgaggtttttggtgaataagaaatacaggatattgccgttatcttcaaagtgaagactaagcaacattaaattattcagtaaacgcagtaagtaaaaataagctccagttctaccttatatacatttcagaaaaagacgctatgatgagggtggtaatcaggataaaacagagaccatgagaccaacgtggaccttaccatgagccacatgccctgaaggtagactggctatctttgggaaaatctcaactcttcagattaaaagggtgaatgaatatttccaggatttttaaattaaatgtgtttagctatggccattgatgcctttttgtcctcattcattttcttcccaacctttagggttactcctgcagccctctctaagctgcattggcctctctcaccccagcagccctgtagcaaaccccacagtcccatgctggccagaggaaggcaagggggctcagcccataaaacttcatgactgtctcagctctgcctctttccttctggccttttctatagtcatggctctcaaatagctcacctgtcaccatctccttccgacagtgtcttccagatggctttgaataccagtaccaggccaggctgagcccacaaagggcaccaaccagataggccactgagatggggccggggtcagacctattggatccatgcatgctgtatacacattggtgtgcacacacacacacagcatgagcaagcacgaacacacacaccccaacttacctcctcattacacattatacgcctgcatgcacacacatacacccctacttacttacttcctcattatacatcacacatctgcacacacacacaaccactacttacttcctcattacacatcatacacctgcgtgcacacacacacaaacttacctcattacacatcacacatttgcacacacacacatccctacttacctcattacacatcacacatttgcacacatacacatccctacttacctcctcattacacatatctgcacacacacacacacaccactacttacctcattacacgtcacacatctgcacacacacacttacctcctcattacacatcatacatctgcacatacacacacaccactacttacctcctcattacacatcacacatctgcacacacacacacaccttcccacatacttcctcattacacatcatacacacacacacatccctacctgtgtacctcattacacatcatatatctacacactcacacacacacagcctttgataagaagaattgtatgaaataaatgaacaactggtggccactgtcattaaaccaagcttgctcacccctgatttcaacagtgtcggctccccagaaaggaggccaggtcaatgctgccgtgtcagcagaaaggacagtgtgcttccagatgaaaaatacccagagaaattacaaagacagttatggtgattaatcaaattggaagacttagaatttaccttcaaacaggatttctctcatgcctctattcacaacagcataagaacgtacacatcgggacagaacagtggcccagcaagacctccatccagacagctccagcctgtcctcttgtcacaggccccagcaaggatctcgtgccactcctccccacctctcctgggtctgcacccagtgctctgtcatcctggtagactgtagttggggtggccatcaccccattggccaggacaatcccagttactcctattgccctggcataattgttattagcactctctttttattctgaagagctttggtctggataatatgttacatagcaatttacctgtcggaatgttttctccaccaacacacctttcttaactgttcagttgcagcgtcagtgtaagcacgggacgcagatccttgcatagccccgtgattatatgttggccctgtccgtggttcccagaggtcattgtggacaccttgtaggccatgtacttgttgtccaaggtaaatggatcacacgtgccttctgccttttaccttccaccttcaatcatgttgaactcgaatctgcatcagatacacaggtgagtgaatactcaacaagagagaagaactctaatgtattgaagcctattaatggatccataataaaaataattatctgtaaggttaaggaagatattcagctactcagtagtaagtaatcactgaaaccttttagagaagctcaattcaaaattcaaatggggtgaaatccatgaacctctttatttactcttaatactagtaaatgtagagaaggtggcaaagcatagttcacatgaattattagaactgacattcaagtgtaaataagccttttatttataaatgtcatcagtattctgttcaagtgtgtcatgaacctgtcacctcatgacagacactcagcaagtgtttgttggctcatttattcgcagaacaaaaccatttctcaggctgcatctgcaggcagcatcgcaggtggtgatgaggtcaggtggggatcagacacgcctctcttaaagcctggctctgccttattagctcttgactttgaacagtcccttcacctctctgagtttgtttcctgcctttgagtagggatcatagcaaccaatcccctagcatcattatagtaccgcgtttaaagtccttatcacagtgcccggcactgagaaagctttcaatctttatttttacctaaaaaattcatattgtgcttattatgtgccaggccctgttctaagcgcttagcatatatcaattcatttcatcctgttaacgaccccatcgtataattttctttttgagacagagtctcattctgttgcccaggctggagtgcagtggcataatctcagctcactgcaacctctgcctcctgggttcacacgattctcctgcctcagcctcctgagtagctgggattacaggtgcatgccaccatactcagataatttttgtatttttagtagagagagggtttcaccatgttggccaggctggtctcgaactcccagcctcaggagatccacccacctcagcctcccaaagtgctaggattacaggcataagacattgtgcctggccaaccccatgatataaatatagatattagtattgttcccattctacagatgcagagctgacacatacagagggtaagtccctgttcagagtcccacagctggttaccacccagttagcctggctccagactctactctcttcatgctgcactaggctgccactatggtttgaacgtgttccctccaaaattcaggtgttgaaagttaacagccagtaaaatgatatttggaggtgggggcctttaagaggtgattaagccataagaacccctttttcatgaatgagtttaaggccccggaggcttcacacagcagtgtttgtaacttgctcttctaccttccaccaagtgaggacacaacttccctccccaacagagagtgcagccctcaccagacaatccaacccaccagtgccttgatctcggacttcccagcctctagaactgtgaggaaataaattgccattcttcataaattgcccagtctcgggcactctgttttagcagtacaacatggactaagatagctgctattccatttttcaacattgctggagcccacatggagaattaactagagctcatggaggccgaaagcccaggagctgagtgagaagctccacaggtggtgtcttggcacagacttgagcggtacagttactgctaccatgacccccagcaagctgatccatagagataaccagcagccagctcattccatcttaaacccagatggatcctgaattatcttctattacttaaaaaaaagaaaaaacttatcttcattttcccttttgcactgatacgaacagacgtggagagaagatgcatccaacagtaccatatctccagataaagaagcaatgctgaatcattccttcaaagtgaaagtgtttcaaagaacctgctgcttaattcaacctttacttcagagatacactgagtggaaaatcataatttagtgatagcttgaaggacttcctgaactcactagggtacgagtaggtgggggatgggggtctgttacgggtttgtgtcccctcaaaaaatacatgctggcattctaacttctagcacttaatttgaaataggatctttatggagtaatcaagttaaaatgatgtcattagtgtcggttctaatccaatactactgctgtccttacaaaaaaggggaaaattggacacagaaacagacacacatagagggaagataatttgaaaagacacaggggccagttgcagtggctcacacttgtaatcccaacactttgggaggccaaagcaggaggattgcttgagcctaggagttcaagaccagcctgggctacatagggagacccccatctctacaatatattaaaaaatcagctgggtatggtggcgcgtgcctgtggccccagctactcaggaggctgaggcaggaggatcacttaagcccatgaggtcaaggctgcagtgagccatgttcatgccagtacactccagcctgggtgacagatagagaccctgtctcaaaaaagagagagagagagaaagaaagagggagagagagagggagagagaagggggggacagagagagagagaagatgaccatctgcaagtcaagtacagaggcccagaacagattctcctcacagccctcagaaggaaacaaccctgcaaagaactcatataagctggacagtgagcagatgctagacaatgggcagagacagggagctcagtgcccccaggcaagaccagcagaaccccactcttggcataagagggtccacatgctctgagtggaggcctgaggtcgttcatcaacagagcagccacttcaggccgagggtgagtggtgcctaaactccctgcttcccacagaggaagggccaagccacacagctcagcaaacatccatttcccttctccttcctcccatctgacttgctgctgactgaggagaccctgagagagtccccactctgccactggggtcacctgcccactgaagccaagaaaagtcccatccagctcagctcccctggccagccctgaacaggcaaggaagccccttgctctagcaattctatttctaacccccgccccctcgaggttgacagtcatcaccactgaggcctattttattaaaacctgggacaggggtatgttccccttccacaggttcccttccacctagattaaccctttgcctaattggcagaggtgtagcaaatgaaggcagttgaacctgagggtgctaccctgaaaaagcagaagtccttccctgtatattcttttattattattattatctttaaagacagggtctcactatgttgcccaggctggtcttgaattcccagccacaagagaacctcctgtctcagcctcccaagtagctgtgatacaggtgtgagcccaccacgcccagccttccctgtatactcttatcgttgtccttgacctcaagccttcccttgaaagtaactataggcctatgtaccccaaacctctgtgcaacctctggtcacttacctatgaacactccactctgcccccttaaatttcactcccctatatgctcagtgatcgccattctggggctggtgccgtggaaagggatatatacgaggatcaaggatgatttgcactctgtaaaatattgcatttatattccacaccagcttgaattaaaccctccagatttgtaggaattacctttcttactgaggtttgattacttctatgattttgatctaccaggagaaaaaagaaaatgtacaagatataaatttaaaaaacagaaaaggtagctccagatatctgacaatatttttcttaatacagaacatatagatcctaattgccttcaaacagctatcgccctgtggatgaaatagagatatctttatttttaataaacaacaagaaaagaatcctttatgcggtgttcgcgtggaagcaccaaacatcttgccatgccaaggatcaaataactttattaattgaccaattaaagccttaaccattcctactatagtccaagaatattcaataacatggggaaaatatttgtacaacaatgttaaggggtaaacagtagaattcagaattatctattacataatatatgtataatcacacacaattattctgtaaaggcacaaaaaatgaaatactttaaataatggtcattatagctgaatgatgagttccaggcaattccagcatgtttctgtattttcccaatttattaaaataagcttatattacttttttaatcagagaaaaaagttacattgtatcttaaccatttaacaattatatatctactttataagtatatgaatatccaattaattttacataccaggctgctagcccattaggaaaattttataaccaaccccaaaagttattacaaactgtgtactggaacccatagaagctcaagatatacaactgcaaacaaaaattaaagaaaatatatgaggtgttatcacttcagcaaggatagtttttggtaattgattctgttttagtgtgccactagaaatatatcctcttcgtttatgtcctctcttgctttctctgagtgtataaaatgacagcttatgcggaaatcaagtcgaggtcaaattaccaatattctgtaagtggctggaggtcagaattacctcctaaagagccctgagccccagaatgagtttctatttattcagcattctacttcccaatctcagctaacaaggaaaaaaaaaaaaaaaaaggagaaaggggcaaaatgggttccaaactcagggttcagcctgtgttttcaaatgaccaagaaaaacaaaggcatatgcaggcacaaccagacagagtacagggtagaagtcccttgtatttgtaaaggcaaatgtttgattagttctattcagcttgaataattctagttgtgtgatataagaaaaagagaaaaaactgtaccctggcaaacagctaagaaatccttaatgggctttgagggttccctatattcattatatttttaatgtaacgggcagccaccatgtgccatgcatactgctagaaacataagatgccatgagaatgtggccctagatccttggaagagtggggctacttctttcccaattgttgaatctttttatgcctatttttggttttaatacatgttatggaagcataatcgtccttccaaaaatacttggtaaccaacattggtttaatggtgtataaaatttattttggctttaacaaggcatctggatcacagattcctataaaggttgcaaagtcaggccccaagtgatacagtccatgggacactgcctttcccatccctatccattcctcctgctcctactcccagctgccttgtgtgaaaaggtcagttgtactggtttgcccaggataatgaaatgtcactgaatgagctgctataacactaactatttttactgcttttgcatgttcctttctacttttatctcatctttgaaagatgttttacgacatctttgcaagatgaatggaaaaggcaatggggcatgcactgaaatgtggactatgctaaagctttgcaactcaagaccaaattccacatagatacttcctattcacttccatagtctgcttgctgctttccctgcctcctccaccctatcccaccccaaccaattcagatggacttcaaaaattcaagtccagtagggcacagtagcttataccagtaatcccaatgctttcagaggccaagtcaggagatcacttgaggccaggagttcaagaccagcccaggcaacacagtaagaccctgtctctacaaaaaatataaataaataaaaattttaaattagctgagcatggttgtgggtgcctgtagtcccagctacttgggaggctgaggcaagagtattacttgagcccaggagtttgaggttataatgagctatgattgcaccacttcactccagcctgggtgacagagtaagaccctatctctaaaatgaatgaataaatgaatgaatgaatgaataaataaataaatggattaatttaaaaaaaatcaaatctgataatgatattacctggcctaatcctttccaatggttccatgtcacttaccaaggacagtcagaactgctcatgcatattccaggcctttctggtcatccctgctggctccgtccccactcctgcagccaatgtgacagccccacacctgtgcacatgcattccccaaacccgcaccatcctcatcccatctcatcaccagaagagcaactcctatctgcacaagcatcccatcttccatgaaacatgtttcttagaaaaatgtttaattaggaaagaaatttaaatcagtaccttctttgaagaagaccggagggatgggtttggccctggagagaaagttatacccaatcttagagaatcttaccctgctttttcttttattcagtacccagtaactactgatgaggtggactctgtaccacacattgatttcactactaaagccccaggagaatagacaagtcctggaaccaagcggggctggcaagactttatgggaaaatgtgcatagaagtaaaacatgcaaacaaggtattttgagtccttgtgaaatatacttctgcagaagtatatcttccactttcatcactgtccccaagaacgtttggggaataaggtggccacttggatagctaagctgcaaaaccatcagatgatacatgtaaatggcaggtttaagagaaagaatagctcccagtccagcaatccacccatggggttggattaccatgtcgaaagacaaaatgtgctccttgtaaactagagtggccagccatggaatctgcccagcctgtgggcaaatgttggcaggccccatctaagcactgtgcagggaaggggctggcccaaggactccagctgcctggcccaggggcagctctatctaaatgaaagagtgtattaatttcctagagctgccataacaaattagcacaaactgagtggttaaaaacaacagaattgtatggtttcacagttttggaagccagaaatctgatatcaaggtgtcatcagggttggctacttctacaggctctgagggacagtgcattccatgcctctttctagcttctgggggctgtcaggaatccttgacactccttggcttgtagcttcagaactccaatctctgcatctgtcttcacatggccttcttttcttctcttgtaaggatatagaatttgtaaattgacactggatttagggcacacctaatcaaggatgatttcatcttgaaatccttaacataattacatctgcaaagactctttttccaaatagggtcacatttatagggttcaggtggacacaccttttgagtggctcaccattcaatccactgcagaaagcatacattattctgactgaacctttgccactgatatccccagttctgaatccaagctgatcacacttctttctgattgtgatttcattccccaggtaatcagacctgcctggcatttttgagaatccaggctctgtgcagttacatttcttgtaaaaaatcaatggattggagatccggttttacacttgagtctcatgagagaggtgtgtgtctgtgctagagagagaaacaaaaccatctcttaatgtgttcagccaatcttctctgagcctgccagcctagggccaaacccaagcctggcaaattctccaaggtaagccatcctgggagggccctggagacactgcctatctgcaaaagaccctctgctatgcgtggccaagtgaggaccgagaatcagtgcgaactagagcttctcaatgagccagtagtcacccccgatccttccaccctatgtctgtgctgaccaatggggtgcacagtagtgtgcactaatgatgtgaccccttggattatccttttggaagatgaagagtggagccagtcaagaggcagaagaagagataaagaagaaccttaaagaccatcctgactccccatgaactgtctcagattgagcgatgcccactgttcaaacacaagtgtgaccaacccatggccaggtagctgctgcctgagaagtaagggccctctgccctggaatttcacctgcagcctctcctccccaaatacactctgccatgtgtcgttgaacctgaaatcatagtttctaagcctctctcagctactgtcaaaaaagccaataggaatagatctacattaagactttttaacccattttgtgttgctagttttgtaattgctgttggtgtttttacatgatttccaaaagatctggcttcctggagaagctggcagttttccagtgatcaaaactattctgtgataagaaaaggattggccgggcgcagtggttcacacttgtaatcccagcactttgggaggccaagatggatggatcacttgaggtcaagagctcgagactagcctggccaacactatgaaaccccgtctctgctaaaaacacaaaaactgccaggtgaggtggcaggtgcctgtaatcccagctactcgggaagctgaggccttgaaaccaggaggtagaagttgcagtgagccgagattatgccactgcactccagcctgggcaaaagaacgagaccctgtctcaaaaaaaaaaaaaatgattaggaattaagattaaaggtcacaatgacactatgtgtgtgtcctcagggaagacatttcagcagagagataaaagcttccgggtgctttcatctgtgagtttccaacaaacctgtgagcctccggcagttgtagaaattctcagacgagatatgaactcatttccagacccacggacattgaaatagggaagaaggacctgatgtgaaaggacagaggtaagggccagtttgtagcactagagccaataactgggaacctcataactccaactgagtcatcctggctcatgcttctgaagttaatttaacttaaagaaatatgtttttctttatggatgaagtgcatgggtctgtgctgggtgtcctgcccagcttcccttcattttctgtgccaaaatcagccaaaatgctgtgtctgtccatcacttttggccaatcaagcagaaatgcaggggctagaagctctagcacattcctgtcccatttcctctctgtcccccatgataacaacatcagcaggagattgtccaaaactggcagtggtttctggagggaaggaaatggcttcctagtgggaaggatcagggcaaaggctatgcatgcttttgcttttcatgtcagacccaatgcctctgtgccactgcccgatagaaaagaaagattgtggaggacgtaagtgctagaatcatcacatgaacatcttcagggacaatgttctagaggctcacctctatggtccttcagatgggaaatagcaatatcatttcaggaaatatcaatgaatttaataactaaacatttcctgtaaagagataaaggaaagaatgacacattcagctggcaaaaactttggtgtctaatatatgccaactcttccttctctaaaggcttcaaaagtcaaggcccatgtgaatacagaaacatcactgattgagatgagcatggttattcaatatacttctgccataatgacacttccaaatgctatctaagagtttttctgcaaggagtttggaatcgctcatgtaaacccattgatatttttgttacattgcaaggtttttcccctaaagtaaggatcagacaacagccttcaatgataattttttaaaaagcttcctgctttttttttaatggaagttttctttttcaaaggtgaaggatgttgtttctcatgatagctttgttgccaccaacagaaactcaaagtagagatctagaggtgaatcaggtaggattacctacattgctgttcttggaacgcagctccacttatgggagaattgtcaactattttaatattctattttccaggaaaacatagtcccatgttcaacagaagcccagaaaattccaaagcagacaatcaacaaagcagactctgtcaccaggcaagatacaactacatctgggtcaacaacatgaagaaatacgttatcactgtgtaaatacgaacagttccaggaaacagatctttgcattcctgccttttgtttcactgaaaccaggacatggagctcatgcttccagacaaatgtcaagtctactttgaccctggctttccccaagtacatgaaccctccagggaggcagagagttgcctggctgaaaccaaagaatcttctggccacccccaaacctgcccctggcaatggcctatacaaagtaagtctgagaaatgtaatacatcttaggaatgcacctggaatatagcaatattatatccacccagggaaaagtcttcctggggattagagtgggctctgaaatttgaggcttctcaagctttcataattgttatcccaattaatgtaactgcagacaccattcttatattcccaggtacaataatgtcccgttcctttgaagctcatcaagccatttgcttcaacacttgaggaggcaagccccaaggttaacagccctccacgtgagcctctcatctgcctgctgtacaaatgtgttttctttgcatttcagtcatgccctgaccttggagaggacgatgtaaaggggaatgcctaattaactttccatttataaaccaattattttactattggcaccttcattctgcaatcactgacataaaatcttttacaaaacaaaatgtaataaatgagaaatcgattggattttttttaagtttgctttgaagtcagccattaataagaaatgtcctttaataagagagatctgtctatagaagttcctcgacgtcagagcccagctgtgcggctgctggaggagacgaagccgcattcaatcaaggctttggaactcttccttgttcatctttaactgcaaggacagaggcgtactatttttctttttttttttttttttttttggtagagaggggggtctccgtaggttgctcaggctggtctcaatctcctggactcaagcaattctcctgtcttggcctcccaaagtgctgagattacaggtgtgagccaccacacccagccagtaccagaaggactgcttttctccttaaaaaagagggaaagaatgttttcacatagatcttcatgtgctaaaatcacaccaaaaactcatgcaaggtcaatgaagaacaaagttctctgctcccaccacagaatctttgcattgactgtcactgtcccggacactctttcccagaggtcagcatggttctctcctttatcttcttcagttcatcatcaagtgtcaccttttggtgagaccttccctcaccaccctactgacaactataaaccagcagccccgacatctgcatcccttctccaccctgctttcctccatagcactcccatgcttgacattctttacattgggtctactcctcccttttgattattccacgcctccccaccatgagaatgtaagctccatgaggacaggaagatcccagcaacacctagaacagaagccaacatagagccagcactcaataaatataatgagacgtatacatcaagtatttacaatggaaagtcaaaataccgctgcccatcatgagcaagtcattccccttctctccacaaagatagacagtgtggtgaagccactgcccaggtgagtcgagaacaaagaagagagagaaaaactgctcctgttctccaacatcagatacaaagcaccgtgccttccatgtcacctgggagcccagactcaggcagctaccatgatccctgcccacacctccacctgaaactccagagggaagaggggtaatgttccctctggcttctagcttgctcgtggcttgctggtgagttgtatccagggccagctccatgggaactgctgtagtcacacccagggtcccatactcagaagagtcccaagcttggtttcatgctctgctgtggccgtctggaaattctttccaattttacctttgaacttgggacagtggagcatgcatatgagcagaagagattcataaaaccaaaagaaaaactttatattttagtacctttagcagcatttttttctctgctttttcaacaagcagatccacattttctttttgtactgagccctaaaaattacgtagttggtcctggatgcattcatgttctttgtggagggaaaactttctaaggtggagaaaatccactctgtctaatggttctgttctcccaacttgatagaggtgtggccatctctttctggctaacaacagcaacaacaaagcttagattctaataaatcccaaatcaaggagaataattgagctgattagttgctttgaaggaaagaaataatacagaaaattcttttataaaaataattactggaaattttaataagctaatttaataaattttcccagctaataagagtagctgggaaactacttttgttgttgggaagctatttttgttgtttggaaacttcagaaagttatttactgaagtcatatgacaatttctactacatgtgcaccatgtaccaaaagggaattgtttaatccacctcttcccaagggcagagtcaggattcgtggacataaaacccaaggctttacaaatactgaagagaacttggctattcaacaattatgtgtattaacaaaaggcaaaatgcatcattaattctataactttctaattttgagaaaactccatagactcacaggttaaattaaaatagaaaaaatttaaatgaattgctaaaatgtaaaagttagatggatcattcgtatgttgaatgataatgatatccaaatttgataaatttcaaaagatcaaaaagtttaacttcatataacttgtgatggttaatactgagtgtcaacttgattggattgaaggatacaaagtattgatcctgggtgtgtctgtgagggtgttgccgaaagagattaacatttgagtcagtagggtggggaaggcagattcacccttaacctggaggacacaatctaatcagctgccaacaaacaaaaagcaggcagaaaaacgtgaaaaggaaagactggcctagcctcccagcctacgtctttctcccgtgctggatgctccctgccctcagacatcagactccaagttcttcagttttaggactcagaccatatatatatatatatatatatatatatatatatatatatatatatatatacacacacacacacacacacacatatacatatatatacacatatacatatatttatatatatacacacatatacatatatatacgtatcttctattagttctgcccctctagagaaccctaatacaccaacagagtcatattttcccaatttgtcaatccttccctatttctctgtctctactattctataaaagataatacaagacctaggaaataaaatcaaacacctacagaagtcagacatgtaacataaacatgtgaaccaggctgaatacaagacagaaggggtaagacagtgggactgcatgtgtaccttctaaattttttttttttttttttttgaggcagaatcttcctttgtcacccaagctggagcacagtgacgcaatctcagttcactgcaacctccacctcctaggttcaagcaattctcctgcctcaggctcccaagtagctgggattacaggcatgcaccaccacacccagctaatttttgtatttttagtagagacgtggtttcaccattttggccaggctggtctcaaactcctgacctcaagtgatccactcgcctcagcttcccaaagtgctggaattacaggtgtcagccaccatgcctgcccactttttttaatcaaggaatcttctgaatttttaatcaagtcaggatcttctgaaaagcataaaccagggcaggattcaatgtacaagtaatttattaagagaagcgcctatgagtctcttattcaggctgctataacaaaatatcatagactaggtggcttattaacagctgaacatgatttctcacagtgccagaggctgaaagttggacatcaggatgccagcagcagtgttaggttctggggagggctctcttctgggttgcaggcagctgacttcttgttacatcttcatatggcaagacaggacaaaagaactctctgagtgtctttaaagggaactaataccattcatgaggctccaccctcatgacctaatcacctcccaaaggccatcacattgagattagagtttcaacatatgaatctggggggcaaagacattcagtccataacagagacaacatgaggagcaggctactagagatgttagaccatcgtgtaggtctgacctgcatgaaggagagagggaaggaagcaaggtgaattagatgcttcctcaactacagtgcatttctccaggaagttctacaaggccagttgggaggcatcaagccacagtcagaggcatcacctctcccagaaacaggcctgtctgggtatcccaccttgctcagtcatgaaaagcaaggtctcgggccgatcagtgatggatttcaaagcacagcagctggggctgttggtcaacgatgccaactgcagtcatagatctgaggccattctcatatcctccatagtgcccaatagaatacacctgaaggctagcaatctgagcctgcctaggcccttgttaaactctcatgcttcattctctcaccaactgtcatctctccatgcctatacctcactaccgaccaaatgaaagtgtagctatccattccattcagaaacatggaaagaattcattccttgaaaaacagaccttgcaggacctgtgctaggagcagacacaacttctaaacaagctgtccttacagatctgttggaaatcagtcactggagctgccttcaggccagaaagtttgcatcaggtgttcaggttgttctgtttccccacagaggtcacaatgcccttgactgaatgtggctccatggttggataacttatgcaggaataaaccacgattaaaaaaataataacaaatgtttatgccagcttttgaatcataaagcaatttcccatcctttccttttcatacagaaaagtgttccccttaggaaacttccaatgatgccactgattcttccatggatgcaaaaaattgtgttagtgttgtattttcaaggttgagaaggaaaaaacaaaaacagcactagcaaaccgagaacctgtgaaaatatcggtggtagtgttgccacacagagagactgaaaatataatggctgcattccccaaggtagtctcaagttaccaaaatcattctgtggaaggccgagagaaaataaaggaaaagatccctgtaaatacggaagcagtgaagagagtagcaatagaagggcagccctttaaaaacaaaggaattataaaacatgaaggaagactaacagctaagccttcagaggaaccagaagaaaacaggcaactgccagaaagcccaagaaccctcatactcaacgtgttccccagaaaacaccctgccctaatgtgtgggtttgttgttgttgttgttttcaggaaatggaaaccccatttcttccattgtactcatcagaaacctatccatgtttgacaacttctctccttcactcctatacaaccacatcacccagtcttcttggtttcattttctcttgaatccatccacttctcttaaccctaatgtccaccctggtccaagtaaaggtcacattttgcctactctttaacgatggaccatccagctggtctccttgagtcaactcttgctccacacgcccatcattctctaaagagtcctcagtggtcttcttaaaacataaatgtaatcccagcactttgggaggccgaggtgggtggatcacctgagatcaggagttcaagaccagcctgcccaatatggtgaaaccccgtctctactaaaaatataaaaaattagccatgcgtggtggcatgtgcctgtaatcccagctactcgggaggctgaggcaggagaatcgcttgaacccaggaggtggaggttacggtgagccaagatcatgccaccgcactccaccctgagcaacagtgagacgcctctcaaataaataaataaattaattaattaatgggatcatattgttccactgtagtctaaacctctctagtgggttccaatccagttttcatcacaaaatccctcatgcttgacaagatcctgcatgtttgtaacccctccctctctaacatatccgccccatctcctcagtccctacgcagcaaccacacgggctttctttgggttcatcaaatattgtgctccatcttgcctcagagcctttgcaaatactgtcccctccacctttcctccctctctttgcctattacttcctgcatttcctgaagcgcagaagccagttcctcaggaaaacctttcctaacatgccctgcctaccccatcccagaataactcagtctctctctctctctctctctctctatatatatatatatacatatacatatatatatattacactttttatagcatggctgacatttttagcatatttgtagggtggtttgactaatctgtttttctgtctagacttaacgcaggaactatgcctgcctttaattttctcaattatttcacctgtggctagcccagcacctggcacatagatgaataattggatggatggatggatggatggatggatggatggatggatggatggatggatggtcaattgatccattgattgactgattgctaagtaccagaatattataaagccataagccagaatattataaatccataagccatctttccaggggcagaaataaatatcaaatgtagataaaggctaataggtaaatataccacttttttaatgttttaattgctgaataggtgctatattcacatacttcaaatctaaaagatgtccactgagaatatttgctcctgttctgtgtccttccactccatttttcactgcctttataagtaactagttcagtaagtatcttatatttgttgtgtttctttacacagatacaagtaaatgttattttcactttcttacacaaaagagagaatagtagacacagtgtttgacacattggattttgttgttgcttttgtttaaggtaacaacataccccaaagccctctgattcattccctaagagcttccttactcttttgtacagttccatggcagtccattgtatggatgcagcatcctttatttaacccttcccatcctgctgcttagtcttttgctatttgaaacaaggttctcactacatcatccaggctggaatgcagtggcacgatctcagttcactgcaacctccacctcccagattcaagcaattctcctgcctcagcttcccaagtagctgggattacaggcacacgcctggctaatttttgtgtttttagtagagacggggtttcaccatgttggctaggctggtcttgaacccctaacctcaagtaatccacccaccttggcctcccaaagtgctgggactacaggcgtgagtcactgagacccatagcattttaaagtaaaggttcataaaagttgaaaaaaggtaagttaggaggtggtggagtaagccttaaagacagaaatgcctgggtttgaatatgagttctggccatcatcagctatgtcaacttgagttagataaactttctgagcctcagtttcctcatctataaaatggagacaatattcctctagacatggctgaggatgaaacagaataacacaaatgaagcatttaacttctcttgcatgctctcacgcaatccatcacttcaaacatcacccatcaaggaaggctcccaagtctccttcttcagctgaaacctgccctgtttttccaggtacctgctggattcttcctcttttatgtcttgtatgcccccaatctttgttttgttttgtttgagacagtctcactctgtcgcccaggctggagtgcagtggtgcaatctcggctcactgcaacctccacctcctgggttcaagtgattctcctgcctcagcctcctgagtagctgggcttacaggcacacaccatcatgcccaaccaagtttttgtatttttagtagagacggggcttcaccatgttggccaggctggtggcctcaagtgatccgcccacctcggcctcccgaagtgctgggattacaggtgtgagccactgtacccagccccacatctttaaattacaaaatatccagaacaaaaccttctcaaaaatgccatttaaaactgtattattttcctgcacttcccatttacccaaagaccaagataactgagagttttcttctacccctgcttctccctttacccacactctcaattcagtcaccaactcctgataatttttttctcccaaatcttctggaatctgtttcttccatttatttccattctgacccagaacaggtgcccaaggtttcccaaccagactattgcaaaaaaaggggggccagactagtttgactgactctggtttcataacctttcaggacaacctctctaaccagtccaaaagtgatctttctagaatacaaaccaggccttgtttctcatttgtttgccctccaccttctgtgggtgggtgtctaaaggaatagcatgtaaaccatataaaccacagccttctcccaggccgcacctccagcccctctcctggcctctggccacagcaaacttctgccttcctctgggaaactctctctctcaagcctccttctctttgcacagggaacttttctatatgctgttcattcgctcattcattcagcaaatatttttaagagcctgatatatgccaattatcctttaactttaaaaaggatggtctggcatgccccagactacttaactcctagaaacttcgttgatgtaacagactcctgaatttgcatagggttgacctcccaccactggtacacaggtgtcttctaggacagtgtttcccaaccttgacactattggcatttggagccagataattctttgtttgggtagggggctatcctttgtgttgtagggtgtacagaagcatccctgaactctacccagtagatgccagttgctcacgtcaaccaattataacaaccaaaatatctgcagatgttcccaaatatcccctgggggttaaaatcatcccaggttgatgccctgtattagggcatctatgatacttgctactcccaggtcagtaagtccaattagcatgatgtcactaataggtgagacagagcaatgttctgcagaatgtcagcatgatcaagatccctgcagacatgcagatagtgaatgtatactgctatccttgccacggaaaggccaaccactgcagagtccccctattgatggaggttgacaagaaatcatttgccagatcagtagtcacatatgaagtttgagaaggcgtgttgctcttcatcagtaaatatagcaaacccagcacaacagcttcaaggggctatcacctaatagcatctgccatcatttatctggtttttacacggacacagtgggtaaactgaatggagatattatggggaccaccacctccttgcagctttgatgttcttgatgatagcaatcatatctgtacttcctcctggaatgccttgttattcctgattgccatcttgaataatggggaaagaacagtttccgatactttacttggcccttcccaccatagttccttactccataagtgggagttctgccaaccactaaatatatctaccccaattgtatatttggggacctgataaataaccacagggtagtttttggacccagtggaccaaatggacccattgtgaaacagacttggggtaaaactctatttatcaccagacttcctaaaactgccaatctaacgggacagggcaggtggggagggacaacataaggcatttaatattccttggtatcatttaagatcccttggtattgaagcagctatgttgtctggggtaaatacctagggtttgtcatctcacaccaggaaaatttaggacacagacacacatgaggcatttaggagcagaagtttaataggcaaaagaaaaagaaaggaaaacagctctctttctctagtgagagggagggaacttccgagaggaaaaggcccgctggcggcagatgcgccagattttatagtcaggcttgaggaggcggtgtctgatttacatagggcccacagattggttcaaggtggtgcctgatttacataggactcacagattggttcaaggtggtgtctgatttacgtagggctcacagattggttcaatcaggtatgatgtttacataccactggggaaggctggccacccaccctaatcttacttagcaaatgaaatttccccttggctgggtcatgttgtctgttccttactgtacacgtggctatcaaagaaaagggaagatggagttgctatcttgaacatgattggcacagctgccagcatctatgttggcagcttgattttacaggctgctctttgttagaaaatgatttggggctgcttttcattaaaggaaaaaccttaccgaggatttccgtaccctcactacctgcctaagtaatttcttcttaactccttatcagtatcagctcaaaccttgtatattactaatcctcaaaaagtctgaattgtccctattctctggcactagttacttggggaaatgggtgcaaattccttaaaggggaagattagaagaacacattttcaggtatactgtggaaaatagaagggtccttcttcaaggaagcctaagtcttcccctcaatccacacatcagtcattgcaataaaaaattgtagactctcactcagttttcaaatgtatttggttggtgcaaaaataattgcaattttgccattaaaagtcatggccaaaaccacaattacttttgcatcaacctaataagccagtttgaaaactttacttcaagccggttttcaaactggcttacatttgaaaactgagtgagagtccacaattttttattgcaaggactgatgtcaaccttctattctccagctttctttttattattattatacaatcttaataacatcctagttagctgtccttctgtctcatgcctaggaacaccaggatctcttaaccattgctacaaatctctgaaggttgaggcaccctaagtactattcttcagtgtttccaattataatcattatggccaccttgcctctggtggttacgagttgccttctagttttataattctggaatctcactatccccattgatataaagaagttcagttgcagccgggtgcagtggctcactcctgtaatctcagcactttgggaggccgaggcaggaggattgcttgaggtcaggagttcaagaccagcctggccaacatggtgaaaccccatctctactaaaaatacaaaaattagccgggcatggtggtgggtgcctataatctcagccaaggcaggagaattgcttgaacccaggagatggatgttacagtgagcccagattgcaccaatgcactccagcctgggcaacagagtgagactcctattaaaaaaaaaaaaaaaagaagaagaagaagttcagttcgatggaagtgtctacacccataacccctgcctacagaagacagacactaagattctcaaagatattagtgagcccttcacttgtgtactcctgctgcattcatagcaaaagtgtctcccagtctttttcaggaaacacggtgatgtggcaggttctcaggatttacatagtaaattcattctaacattcccaactccttgagccttaacccctttctcgacataatgccaaatatgctccagcatctccaccttatcaattgcagccgtcatcctatctaaatgtcatggagctgtctcaaaagactattaggaccagctccaggtaatcatgatgatctaacaccctcaagatacgctactacaaggtgtttgctaattcgtgcctgccagctcctgtaagcctttgacacatagactgttttctcctgcagcagggattgtacttcctcattgaagctgtgctcaggcctgactctggttgttagccaggacataatgagagatagtggggacagatctggagaaaaacaatgatcattgtgtggagcacctccaggtgaggtcatagtgtaatgcactgggaagacgaggctgttctctccccaggttgttgggaacagcttcggccagccaggaagcttcagggaattgggggctacaatattctcagccttggccacgcaaacatcaccatccaaggtcttggtggtccactctcctgtcaggtctttactttgacactggggcggtgttaaggctgtgcattttgcttcttttgcatttctgccacccttataatcagatcccaggtttaataaccttctgtcctgtgggttttagagatgagaacctcctctaaagtgactacagaaatactctggctttcagacagggcctccaggtggcaaatagctgccctgcacttattattttctttttgcaaggcttccaatgccttcaaaagttaccacccacatccaagtccttagggttattattgctccaaaatgcatcaagtgctccagtgtctgataagtcagtactttggcttcctcctctgcctcatcctaattagcttcagataaaagcttttgtaattgtgatgctacagaatgtcagagattgtcaccacccacttgctgctaccaaaacccatcagaagctctgctttctggggccaagtttccctggacagtagagccttgggcacacgtttacgtgctaagacttcactgacaagtgcaatcctggggaagcaggagtatgagggagaccagtgaggcaaggaagaggaagatcaaacatgagggcgtgggttactgagctgcttttttgttttgtttttttttttttgagatggagttttgctcttgttgcccaggctggagtgcaatggcgcaacctcagctcactgcaacctccacctcccaggttcaagcgattctcctgctttagcctcccaagtagctgggattacaggcgtgggccaccacacccagctaatttttgtatttttagtagagacgggatttcaccatgttggccaggatggtcttgaactcctgacctcaggtgatccacctgccttggcctcccaaagtgctggaattacaggtgtgagctaccgtgcccggcctactgagctgctttataacagcctggatgatggcttgatctcacataatgtcttcaggaaggtcacatggatgcttgcatctcagaacagtatgtggggcagggcatgagatggagaagggaaaataactaattagccagtcccttcctatccatcacctcctgctgggcaaaggtggtgacagggggttttagtttctccatgctttctagatgcatcccccgccctcttcaggtgaagcttcttctagccaattcgtactgcatggagagcaacttggcctgtagtacaggcagcaacaatggcagcaatgaattgactttgtgactgcaggaccagcacaagccatggctggggccaagccagccagtgggtaagagaggtgggcagctctgtggtgatatagaaactgagtcagagacaagccctaaactcaggcctcacatttgaatataaataagctcatttcagcacaggcgcaaggtgcagtgactggcaaagtcatgtgaagtcctttctgatcctttgcaaactcatgcccttagtttttggggtttggatgggttgcttttttgttgtttgtttttgtttgttttttttttgtatgtttgttttttttttgttgttagacacaaggtctctctctgtcacccaggctggagggcagtggcacaatcacagctcactgcagccttgagctcctgggctcaagtgatcctcccacctcagcctcccaagtagttgagactataggcacatacaaccacacccagcttattttttaattttcttttttttttctttcttttgtagagacagtattttgctatgttgcccagctgatctcaaacttctagcctcaagcaaacctcctgccttggcctcccaaagcactgggagattttgtttttaaaaaaaatgaagcagtctgggtgtggtggctcacacctgtaatcccagcactttgggaggctaaggcgggccaatcacgtgaggtcaggaggttgagaccagcttggccaacatggtaaaacccatctctactttaaaaaaataataataattaggcaggcggtggtggctcacacttgtaatcccagcactttgggaggccaaggccagtagatcacccgaggtcaggaaatcaagaacagccaggccaacatgatgaaaccccgtctctactaaaaataacaaaaattagccaggtgtggtggcatgcacctgtaatcccagctactcagttggctgaagcagaatcaattgaacctggggggtggaggttgcagtgagctgagatcacgccactgctctccagccttggtgacaaagtgagtgagactccatttcaaaaaataaaagtaagaaacaaagctacatcacagctaaaatgttaacatttccttaatgcattaattgaacctgagacattaaccacagattttcagggaattatgcctgttcaaccaataaagctgatgtagaaaaccagaattgttttaaatgatgaattctatcccattgggcacattctttcagctcactattgctattctgtcctgtggatttttgcttaattagctagacaaattgcacaaattctgcaattctatttttactttaactatggccaaagctccttttcagtttctcatagctttctacccttcagctgctagacgtccccagttataaggcaactcgaagtgtgtgcaagggacagaagtttgtatatctgaaactacaatttggtaaaacacaagacaaaggggggaggagagagggagagagagagagagagagagagaggaataagagtcctatttgcacttaccatgagccaaattgaatttgggggacttgaaatattttaattgtaaaatgtactatatcgggcttcattacagattatgctcttaaaggtgcattgaaattgaccatattgtattttatctaaattaagaaaattctctttaaagaccctgcattgaatctttttcatgctaagtatcattttgtgatatgaataattgcaactgattttatctgttgtatatattcacatttatccagaaatctttcaggaggctatccttgtatttcacttgtttggtttaggacttagtatccaaagcgtgctttgcttttatattaaatgaatagtacagtgcaatacaagtcaatacagaccaaaaacaggagcaacaacagaaatgtattcaatggtatgacagtaactttttcatgccaacaaggtcctccttgtacctcctttgtacccatttgtcctgggtacaaggtacacaagacaacgcacggtcgctatatttttctggttttgcattcagtaaaccaacattcatgtggcatttgaataccaagacagggcaaagtttagacagtcacctttcattttcatctttcattataatgagacttgacgtaaccagctgtctttgaagtgcatgtcacgaacatgcccatttaactccctgctctgccaaaggcctacggaggagcaagactgattgtcttgatgtacacagagccagcacagtgttcatctataatatgactatggagaagggagagacttttaataaaaatatcctgtattccaacatgaatctttcagactggatgagaaaggatttcttagacacccaagctattaacacttggtggccagtcacggagtacactgccaggcacacaaaaggctccctcaaaaccatgcattgctttaggtccttaactactttccaatttattcattttctgcagtacagtaggaaagaaacttgcatagatgagaaccacataggaaaacacgctagggatatgactttattttttaattttttaacttaaatcttattttttaattaattattaaactattgattattttttaattttacaaactacagccaattgtataaaaataatttgttcaataattcattttttctccactgatttaaaatgcctcctttggcagggtacaatagctcatacctgtaattccagcattttgggaggccaaggcgagtggatcacttgagtctaggagttcaagaccagcctgggcaacatggtgaaaccccatctctacaaaaaaaaaaaaaatacagaaattagtggggcatggtggcacacacctgtagtcccaactactcgggaggctgaagtgggaggatggcttggccctggagatcaagggtgtagggagccatgattgtgccactgcactccagcctgggtgacagagtgagaccctgtctcaaaataaaataaaataaaacaaaataaaatgcctcctttattacatgccagtttcccatgtataatcctcatacagttgaacaccttaagagcaaagactgagatttcccaaagaagcagcaattctgcctcaagatacagaaaccctgcccaagtttccagcctgcctggcctggcctgcagaattcagaatcaagactgcaatgtcaattctttattttattctatttgtctcttggtctattcctacaccagcatctctctcttttaattagtgaaactccattgttcctgttcacctcaaggaaagtgaaaatctctccattattctttttcaaagtttcttgccttttctactgcctttgctttttagtttagaataaaatctgcaacagtatcatcatccacattcagcctcaaaggaagttccttcccttcttcctttacccaacgtatactaattaagcatctactgtgtgggggtcactgtgcccaggggctgctctcacagtgatcccaagtgtcacacagccacagtctaatagactacagactagttaataatgactttctggccaggcttggtggttcacgcctgtaatcccagcactttgggaggccaaggtgggtggatcatttgaggtcaggggttcaagaccagcctggccaacatggtgaaaccctgtctctaccaaaaatacaaaagttagccaagtatgctggcatgcatctgtagtcccagctactcggaaggctgaggcaggagaatcacttgaacccaggaggtggaggttgtagtgagctgagattgcactactgcactccagcctgggtgacagagcaagaccctgtctcaaaaaaaaaaaaaagaaaagaaaaaaatagtgactttccacaatgcaatgtaacgggagaaataaaggatggctggatgctcaaaggaaggactgtgtccagatttagaggttcaggaaagatttccttaagaagtgagagctaagcctccacatagcaaaggagttggccagaaaatcagaaaggggagaatatttcaggcaggcagaaggtagtaggtaagagaaggtaaactcagccaagagactcaatggaaaatgtccaatgcgactggaaggtagaggccaaggccagaggcctacaagctgtattagggagcctgtattctttccaaaagcaatgagctgccttagaaagggtgctgagcagaagagagtaaggaaaatgtgtcaggatatctaatagtcattgactacccaaatgttcccccacccttcccagcacagttttgctctgtggtgaggcagtgctgtgtgagtagctctggccaaggaacagtgagtagaagtgatctgtgacatttccatgctaaggcttgtaaaaactgttacttgaccaggcacagtggctcacgcctgtaatcccaacacttttgaaggactaggtgggagaatcacttgaggccaggagttcgagactgcagtgaactatcattgtgccactgcactccaccctgggtgacagagagcctgtcctccaaaaataaaaaataagtaaatttaaagctggtccttgaccttccacactggctgccacagcaatctggaagccatgtgctgagatggtggcctccatgcatagaagcaggattcccatgtcaccacatggacagctgccctggaggctcacccaacccacactggacttttcatgagccaaaaataaatctttctcatgtaagccattgaggtatcaaggtttatttactgcaacaggagcaaactgactaataaagtttgcaaacatgatccagtgattgggatcaaagtttccaaagctctatgacaacattaaaaatccttgtcatctctagcaaaaaaaaatgtcttcctccttttgaaagaagggactaagataaactcatgtcactgctttgccttttcaggggtttacaactactttattgatgagcacattgctctgctgagcagatgtgagattcctcctgcttagagaactgtaagtaatctattatattcctctctttctttttccttcttcatggttccaccttccttgatgatgtatgtgcctctttgttctttcaggcctggcccttctcccatccgtcttcagcagtgagatggtcctggtggtaactcaaaggtggccatgcagcaactacagccacaaacattgtcttcacgcccagccctgctgccccctcccagggcaggagagtctcctaacactgctgctcctgcaggtggaggaacccgagatcaagccttgcctggtctcttatgctttgcctgaacttggatacattccctgacttctctgcgacttagtttcttcttctgcaaaatgaggatgataatgcttacttgagggtcctatggagatttatagggagtaacaaatgtaaagttcccagctcagtgtccagcataggataggaatctcctaaatctgttttcctttttctcttgccctttcttctgaggaagaagctgaacctctcagatcttcatagtttaattccacatctatctatctaggccttttgatgggtacaactccatgcttgagtgtagaggatgcaaaagatggaacaatctagctggggaggcaataggtactcatggggaaaggttaacaggcttattaattaaatgtgtaaatgcccaagtgtttaatatagaccacaagtacttaagaagttcaaagaaagaagagacacacctgggctcctgggattcaggctaaggattcagcacagggaaatgggaagatagaggcccttcccaccttccttcccaaggctaagtctccccactgctgagttggccactctttctaatccaagatggtcatcaaattaacaatgagggagatggagagagattttctcaccagctcagtccactcaaaccagatacgtccacaggtactatctgatgattcagaaaagtataacaagtatacttttgaatgaattggcccaccaagcacatgctcttggaaggcctgctcaagggtagatgtactggttgtacttcacattgcaggttgggactttgcctggcacaatttgctcaggtagaccctaacatctgcaccagtcatacaaagaggattcccaaaataaaataagagattcccattgctctgtaaatattgcacacaaatgccctcaaactcctaattctggcggcattagctccttattgataataacaccttcagctggttgaactgtttacgtggctatgaccagcacgtataatttttgtcaaaaatctaacaaagctccagccaccattcccaaaggagaacatggatttttgtgtgatcctatcatattaaaattgcaaaactatgcaaactacgtaatatatccacttacctaagattctaacatcaaatactgcaaaggccttgatcaaagcagaacaggtcaatagtgacaggtcagatattttgtttctgcttctttccaactcctcaggtacatggaaatttgagggactagaaggctcaaattcagattttaaggtaggcaggacccaatagctgctaaaaaactaacaagttcttaagagagactggttaatagatgtatagtgttgtaaacaaaggtggacaacaatcccacagttctttctccatatatgaacaacatatggaccccacatgttcagacctggaaggtggccgagtagtgataagtgttcttctttagcatcagaaagcagtgaggacggtcaggagacagcgagacagagaaaacactagtgtcatccttaaatgttgtaagagctgtagtgtgaagagaactaggctttccctatagttccgaagagcagcactgagaccaacagataaaagttaccagaagacaaatttcacctacatgtgagggagacctttcaagtaattaaagccattcaaaaactggaagagccacaagaggtgatgagcatcctgtcactgacaaattcctacaaaggctgcctttcactttcttggctgcatggaaattcaggggatcatgagattcttcaggcttcgaagtcaggttttgtagagaatttccacatggacagagaagttaggttgggtgtcctcaaatgactgcccataagctaaccgaaaattcttacttcctctgataatattttcttccaatacaaaggctaagaatttcctgcatgcagggcttaatacctaggtgatggcttgataggtgcagcaaatcactgtggcacacgtttacctatgtagcaaacctgcatgtcctgcacatgtatcctggaacttaaaataaaatgaaataaaaatttttaaaaaagaatttcctgcttcagattatcagtgagcaccctaatcacatcattatcgtttctagtctttttcccaacggacaggtccggtgctcaatggcatttgtgtgattctttccccaccccatcccacagtcacaccggcactcatgctaaaagctgtccactataaaccccatcatttataatgcaaaaagggaatcattgattttgcgctgatgagtcaccataatgcttttctcttatatgtacttaatcgctgtggtttctccgaggatggaaagctttcctttctgtgggaggatctaaatagctctctaaacagacaccagctgggcaaacagtgcagagaatttcggcacaatgtgataagagcagccgcacccgcaacccaggtcgcttctcagtacagcagccaaattagaaatagctactgagcagatccttttgatctaaccgtaggatgcatccatttctttctttctctctctttttttttttttttttttttttgagacagagtctcactctgtgacccaggctggagtgcagtggcgcaatcttggctcactgcaacctctgcctcccaggttcaagtgattctcctgcctcagcctcccaagtagctgggattacaggcacacgctaccacacttggctaattttttgtatttttagtagggacagtgtttcaccacattggccaggctggtcttgaactcctgacctcaggtgatccacccacctcagcctcccaaagtgctgggattacaggcgttgagccactgcgcccagcaaggatgcatccatctcttaagagaatgctacatccagtttcacggttagtcgccaaacctgaaaattatccatgtatcatggaatcagaatgtgtctctcccaggatgggaactggacagagctggtacagcacccaggcaaggaggaaatgataaaacatcagccatgggatgggggtaatgaaatgcttccctttagtcctcatttcggcggcagcctttcccatcctgcccggcatcttcatgctgtgctaatctttgtacaggggtaaggccttccgtgtttatttcttccttttgtccagaaggaagccacagtagtttgcaatcttaaacaggaaacacagaactcagaatccaagaaagcatactttgcctctctctctcaagaagtctcagcaactattgaacaagctgtgcccatccaacattacatacttgtttgaggcagaatgagatagaatgaaaataatgaatgaatgaatgaatgaatgactcctgtaagattgcagactgttgatagccaggtagaaatcatccctttaggaatgttctagcatgtgcatgggcgtagatgtgagaagaatcacagcctcctcatgtgaaacaagggctggccaggggtcttttttagaggttcctcggggctggagttaggacaagtatttccagctcaatgcactatgggaaactgaagctaaaggaagagacagagcaaataaggtctttaacgccaaggccacctagcatgtgactgtgaggacagtcaccctccaaggcaggtcacatgaacttagagcccacctttttaagggcaagactgtttggcttcttgctctggtggaggaatgaagccaagtctttaatttgcatttcccaattgagtggaatcaatctcttttgtatcctgaaatactgtgattgccttgattgggtagtatctttacatgctgaattccaaaccgccagctacagacacacattctttatttgcaccttgtctttatatagcctgggacacactcagaggagggtgagccacattctgaaagggctcacagcgtacctggttttgcccacattagtgaagcaaatgggtccacccagttgggtccacccagtccaagtctcaatgttgagccttgaccagaggttaaatacaggatgtggtgaaaacagctgaaccattaaaccccctaggaactgaaaaccacattatatgtgttatttgttctcctaggaattgacgtgggtatccaaatctaagaagtatgtttagcaagatactgatatcaacaaagggatgaggcccagggcattgttggggcaacaaaaagctccccttccttctttctagaaaagaggaaaggagtcatgctgggtgcagggttctggggaggaagggagggaggcaagcagggatttgttcttggaacagaaaagcacaagcaagcagagtgggcatccgcctcaatgcatggcactgaccatcctgcagacacaggtgctgaaggagcctcagaacgcagctggcatcataggtagcactcacaggcccatgcagcctccccaagcctgcttccccatgtcccttcatgccctgcccactttcctaaccttgtcccccaggagtttccaccaagaggaggagcagctgagctcacagtacctggagttctgttgcacacacagctgtgcaggccctgcatcaccctcgggccaggacaacactggggctacattcacccagctccaccacctccagttgccccatgctgagaaatggcttcaaggagcagccccatcctgtggcctggatttctctaggtgggctcaactcaccctcttccatttgtcctgctcgtttctgcagaggctacgctgatatgtcactttctttttttcagggacctcagtcttggcctctccttttgaactgctcaaggtccccttacatgtgttcttcattgaggcttttttggcagaggtttgcttccccagagattaataaatgcccacagcacactttgctgaggaagctgggtgacactaggagagctctctgtgtctctctaccctccatgttctctagcaaccacattctccatagcagtctgtgctctgaaagttacaggagaggactcgctgggaaaaaccatttttccaactggactccaagttggaaactgtcaagtggaaacataaatacaatgaaaggctcaggaagaaaacgcaacaataaatctcaagaagcagagaatagaatggtgcatgtcaggggctgtggaggggggaaaaggggagcttttcagtgggtataaagtttcagttatgcaagatgatatggtttggctgtgtctccacccaaatctcatcgaactgtactcccataattcccacatgttgtgggagggacctgatggagataattgaatcacaggggcagtttctcccatactgttctcatggtagtaaataagtttcacgagatctgatggtttgataaggggaaactcctttcgcttggctctcattctctctcttgccgccaccatgtaagaagtgccttttgccttccgccatgatcttgaggtctccctagccacgtggaactgtgagttcattaaacctctttcttttgtaaattacccagtcttgggtatgtctttatcagcagcatgaaaatgaaccaatacacaagatgaatgagttctagagatctgttgcacaatgtcatgcctatagtttacacagtatcgtacacgtaagaatgtgttaagagggcagatctcatgttaaacatttttaccacaaaaaaataaacatatgataaaattaagaacacaaggaaacttttggagaggatatgttcattaccttgattgttgggatagtatcctgggtataagcctatgtcaaattcaccaaatcgtatacatcgaacatgtgcagttttggttttggttttgttttgacacagggtcttgttctgttgcccaggctggatggagtacagtggtgcaatcacagctcaccgcagcttcaaactcctgggctcaagcaatcctcccatgtcagcctctcatgtagctgggaccacaggcacgtgccaccacaccagtctaatattttttatttttttgtagagacagtctcactttgtttcccaggctggtctcaaactcctgggctcaagcaatcctcctgcctcagcctccaaagtgctgggattacaggtatgagcccctgtggcctgcccagtttttcaaatgtatcgattacacttcaataaagctgttttccaaataaaatgaaaaagaaaactcaaccatagcgggcgatgggctgtgaagtgggagggaggattcctccatggctccccgactttgaacttggatgcctaggtaaatggcaaaccagggaagacacaatagaggcgggtattggtggatttccacccacaactgccccacataggcaaccgctatatgaaatgttatcacctcttcgttcatgatatatatatgcagtgatgtgatgataaatgtttagcaaccatatctccaaaaaattgaatgtatgcgtgtgggtatgtgtgtctattcctgtacaagtttactacaaatttttaaaattttttcccagcttcattaaggtataattgacaaatcaaaagtatacatatttatagtgtataatgtgatgttttggtctgtgtacacattgtaaaagattaaatcaagctaacatatccatcacctcacctcacatacttagcttatgtttgtggtaagaatacttaagatctactctcttagcaattttaagtatatgatactgttatgatctgaatgtgtgtgtccctccaaaatgcacatgttgaagcctaatccccaatgcaatagtcttaagggacctttaggaggtgaggagatcactggggtggagccctcgcagatgagattagtgcccttataaaagagaactgaggaagcttgttcttcccttctgccctgtgaggacccagctagaaggcatcatctatgaagcagagagcaaaccctcattagacactgaatcttctagcaccttgatcttggacttcctcagcctccagaactgtaagcaataaatttctgttgtttgtaagccactcagtttatgatattttgttatagcaacccaaacagaccaagacaaatacattaactatagttatcatgctgtgtcttataaattttttgacatgaaggatgtatagcacacaatttacaaataataagattgccttttatgtaaatcggtaaagtcaattgattcttacagaatggttttgttgatttttgccaaaccattgtaattgcagccaacatatggctgcaactgatgaacaagtgtagctccaatatgaatgctggttaatatttttgttttacattaacaagtaagaagaaagcaaaataaatgacaaagacatatggtggaaaacattttcatcattcataagggcgactctttgttaaatcaggtagtagttgtcaaatactagaagactgtttcctcaatttttgtgccatttacaatgcagcagctgaagacatgacaaacttttaagtcgaatctgcatgattaacatttccccacacttccttgtgtctagataatcaacaaaacaagcaagctctgattggcagaatttgtcaatttttttggtgtaaatactcccattgtggcatattccaggctaccaaggtgatgtcactgaacacagagttgcaaagagatgtacagtagcacaccagagtattgtattttcaccacacagatgcaatagctggccaggttcggtggcgcacgcctgtaatcctagcactttgggagactgaggcgggcagatcacttgaggttaggagttcaagaccagtctggccaacatggtgaaatcccacctctactaaaaatacaaaaattagccaggtgtggtagtaaacacctgtaatcccagctacttgggaggctaaggcaggagaatcgcttgaatccacgaggtggaggttgcagtgagccgagatggtgccattgcactccagcctgggcaacaagagtgaaactccgtctcaaaaaaataaaaataaacagatgcaatagctataaataaccttaaaagcacagctaataataaaaggcagtaaaatgattaagaaatgatgagcttagaatgttatcatcaaattcaatataatttatttaacaataagtgtaattaattttgaatcatggctgtgtttaacaactggcttgcaaaattcctgaaaagttaacggttggctcttgcatgccagttcagcccagccccaatgcaccgtgacataaatgcccaaacaatatgttattttttgtactttaaaaaatggtaatatgctgcatgcaatctgggagttgctttttcataccacattatgtcactcttgtcttttgaccctcaacatcatccttgccccttctttgctctcagctgatgtatcacaggatggggcagcctgggaacagcccttagggtctctgttctgagatcatcagtgagaagcacatggtgggacaaagacagatttcactcttcctggggcagcgacagcggcagacaaccgggcttctgcagtagcaacagtggcttcctgatacctcctgacttctgaggagcaccacctcccttggcttttgctccctgaccatcctttgcaaccattttttctttctttttttttttttttgagacagaatctcactgtcgcccaggctggagtacagtagcacaatctctgctcactgcaacctccgccacccgagttcaaacgattctcctgactcaggcacccgcccccatgcttggctaatttttgtattttgagtagagacggggttcaccacgttggccaggatggccttgcaaccattttctaggcacctaatttcctgaagtaaacccttcctgctggaaatatacagaatggtttctggttctcagactaaaaggctagaatgtattcatgttaatgcttgttgcctactttcatcattttcactgtggtataatgttccgttttgtggccatatcccacaggattctccctaacttggctccattttacaccctgcctgcccagcctctgatacttttcatagccagtgttctcagattagattaatagagaccgtgctgcggtgtttacccaaatggttctcatgcttacccattagcgtcctcaatccttgatctcattccccctccttttcccatagatgaaccggtggatcctgctttccagtctgtcacccttggcgtacaggctaccacgagttgaaggagggtctattgctggagaagactggttcataggagtccgctcaggctcgcagctgccaacatgaaaaaaaaaatcatctcagaaaaatgtagctcagctgcttacaataagtcattgttatacctacgtttatcattgtggggcacagatgcaaccgtttctctgtgctaacaagctgattaagctcagccaggacttttccagagggtcctccctctccccacataatctatgttgagatgctcagcacagaagttagtgcattgctggaacaaaaagaagtctctctttagagggttcctagcatcaccgcaactcccaattctcctctacctctttgtattcctttgtatcattcattcctcgttccatgtttcgtgtcactgagcctttcaaagagggcagatacagctctctatatttcacagagagctctagaattgcaattacatccatgacacatattttcatacccctcaattctagggcactcatagaccacagtaagagatgctcctgctcattctgaggaacaccaacaggcaagatgcaccccctgactgccccaccaagagcagaccatctgccctctctgacggcatgcttcactctgtcaacatgaaatggcatgttgttcctgaacatcccatgatggtctgtgcttctgtgccttttgcctatcctatttctgcttctgggcacactttttctctccttgcctttgggttgaagccctactcacccttttacacccagttcattctgagttggacttctggaaggatcagaaagtatcctccatgcagacaccacacatcacttcaccctttttcccaaggcaaacaacactaacctagtccaggtcatgttcctgttaggcccaggtatgcctcaaaaactctagcagaacagcaccccaggcagcatttcccagtcaatcacatgagcaagcaagatacacgcctctctgtgtccctgtctaggtttcttccgtgtccctgtctaggtttcttccgtgtccctgtctaggtttcttccttttctggagacaggctagggactggcagctgtgactgtgtattgctaagtgcaattccaggagtctgcagaatggaaggcacatcctttttttttttttttttttttaagacagagtttcacttcatcacctaggctggaatgcagtggcgtgacctcggctcattgcaaccttggcctcctggcttcaagcaattcttgtgcctcagcctccctagtagctaagattacaggcatgcatcaacacgcccagctaatttttgtattttagtagagacggagtttcaccatgttggcccaggctggtctcaaactcctgacctcaagtgatcctcccatctcggcctcccaaagtgccgggattacaggtgtgagccactgcgaccagccaggagccaaatccttgatgcctccacagcccgaggccaagcaggcctccctcttcctgtgctccctgatctgtgctaagatcaggtgctccctctattccccaatcctaacccacttggatgcacatgtgattttagtacagcttcctttaatttcatgtttaatgatttttcatactacaactcttttttgtcagagctgtatttctatgctttttaccttcattggcaaagcttctggaaacaaagtatgttaatgaaattttaaaaataaaaaaattacataaaacccaattcaggtatctccacttccataaagctttctcaaacaccaccaatctgaaataccctattccatgacctctgcacgttgtataggattctttatgcccttgagggatgaggtaaagtcttcccccttaatttctgtcactttaagagcaaacgtagtaacagacaaggagcagacttactgtttaccataagagctgtagattcccaagttcagtgttcatcagctaaaatgtaaactcactacatgcttagcattcacgttggcacatccaggttacccctgtgggacttgaggggcaaggggaaccagtgccaacatgacgctcattcagcttgctgtgccatgaataataaagtcctttgtctctgacccagggatcttgtgtcttctgccagcatccataaaacagtaacaagctaacttatcagcttgtaagtagagtaaaatctcagaccctttgcaggtcctggtctgagttcatgccttttcttctttgggactggccccagagtccagcataggtcctgattagtatatatgtagaaagtaatcaagttcaatggactagactgaggacagggaactttccttctactgaataccacttagcccagtgtttctcttttttttttttttttttggcccagtatttcttaacctcagcactattgacatttggaaccagataattctctattgtaggggggctgttctgtgcatgataggatatttagtagcatccctggcctctacacagtagatgtcagtaatacccacccccaatcaaaaatgtctccagacattgccaaatgttccctggcagagtagtctcatcctctaccctcaccactgaaaaccacttattttacctatgcagaagtgggggtggggtggggaggaggaagcaaggggttataactaaattatcatttagtggagtttgagatgctaatgtaccggagaggtatagaaatattgcactcacctgcctattcactcaaggatcacacatgataagtcatgacatattgcagccaacagtaaaacacaatcgtcgtgagcacccatgggtgccgggcaggagcgtccaccgttcatccacaccctcagccattctgtgaagtgggcatttccactctgcaagaacctgaggcacagggaggtcacgtgccttgccgaggggaagagtttggacttgaacgcagagctgttgatctctgtcgcacttgttcttaatcattaacctattgttaatgatccgacaaagaacgtgggggatgacatggaagagaggggattggaagttatgaaatgggaaaccaaagtttactttgaggggaaaaaaaagtcaaacttacatgtcaatagcatcctcttaaaggttgaaaatatgtaaccctttggatattttaagagcacatatagtatcagaatctgtaacaacatgtactttaattcctacataaaatgttaaaatacagcccaagtgaatagctctctttcctgcatccagaaaaatgcgaaccatccagtctaggaaggagcaaagtgacaaaacctgtttgaacaaacccaatgctacactccacttcaatggagtacctttcccatctggtggtgggttcaagaattgtccctaaaacacttttaaatccactcgtgactttgcaaagtagtagcatcagtgccagcctgagtcccagcagttagacacatattgatcccccaaattgattactaattgacaccagattctggtaatttcaagggcaggtcaattactggctgcctatagaattattagtacaaaggtgagtaacccctaaggaaaaacactattttgactttatttaaacttttccctgagaagctgacattcctctacaacattaattctcagaaatatttttaatgcactgtaatattttatcttggaggcagagaaaaatagcaagaaataagaaaggggaagagagtgcatggaagagagggacagtcacagtcattgccatattcggtggagagccaaaaataagaatacacaattatgtttaaaatatatggggccgggcacagtggctcacgcctgtaatcccagcatgttaggaggtggaggtgggtggatcacttgaggtcaggagtttgagaccagcctggccaacatggtgaaatcccatctccactaaaaacaaaattagccgggtgtggtggcaggcacctgaaatcccagatactcaggaggctgaggcaggaaaattgcatgaacccgggagccagaggttgtagtgagctgagattgcgccactgcagcctgggcaacagagtgaaactctgtctcaaaaaaaaaaaaaaaaatatatatatatatatatatatatatatgtatatcaattaaagattttaaaaggggtaagtcaatttctctctggaatcttgaaaatataatccagaaaaatgaatgactccataactaaaatattaactatacttaaaagtagaattgatgtccaatactgatatatccagataactcatattgacacaaatatctctccaataattttatgttttccaatataattgtctcatgtcttcattctcccaatctttacactgttctctttctttttacagtaatatcatagaaaaattggtaatacatt

SEQ ID NO: 530 - DNA, 126487 bp, Homo sapiens
  source 1..126487: mol_type = genomic DNA
cctgggctccagagactgctggaagcttctgaggcttggaagggctgcgaggcccagcacacggggtagcatgggcaagctcctcccttcttctggggactcagagtccccatgtgcaaaattggggggaagagcggggtcgggggaagagaagacctccaaggcggttagggtggtcttgggcatccgagtcttgcccagggcgagggctctgcattgctcttggtcctctggaaggcagtcggggcagagtgaggcccttggttcttcttggggatgcagggcaccatggccccagcagctgaactggcctggagggtgcgggggtgggtgtgtgtagcagctccccagctcctcccctgaggaggtcagggcagctttgccctcttggagccaggcctggcggcttcctgggccccagtgacacagcagcgcgaagcaagtcatctccctctcagcaaaacagagccaataattgtaccatctctgctggagaatgaagcgcctcaggggccacactgggacgcgccaccctagtgcatgtccctctgggctcagaaccccctttcagcagcctctcagcctagggatcaaggtccttccaaacctgggccaccccaacctcggagaggctccccactgagcacccaaagcacctgtgaccccataccctgccggtgccctccccccacccatgcagccccatgcccgcccttctccccgtggacctgccaccccgacacctggacagaagccggctctggtccctcatctccttctctccttggccttgtggttcaggcccttgtgtcctgtcccctccctgctctgtgagtgtctggtcactgtggcagccatagggtagcacctagaatctgtgttggacaccggtgcgtcacctgttgcttcccgggcaggggaagcacctggcctgtgttccccccctctgccctccaccccttgcccacaggaggtgctgcaaagcctgcgtggcgttggcggggtgctggggtctggaggagcccagccagtcggttgtgttggcaagagacgggcctgaacaagagccaagtggcttctgcgtcagcttttaaaaccaccaaaaggagctcacttgtcatgctgtggtccaaatattttggccatttagatgcaaccttctgtgcctctgaaattaggtgtattattaatctcatccagcccagtgacagagtgggcagatcagacaaggatccttgcagcgggatgaagggtgagcatgttcttatcggtgcaaagctgacacggggtgtttccagaatgacactgatggagtgcagcctgcctgggggaggggtggctgggaacccccggtgatgaggagggcatgggcacagggcttgcttagggaggagaagagagggctccagagacacggttgctggcttccagggtgtcacatggggtgacgtggcagggggtttctgcaggggtgcttctgagatagggcgatagggccagctggggttggctgcaggctccaggagttaggttccagatggatttcagatgggactttcttgctaaccctactttttttctgattataaaagtaataaagactccttgtagagaaggaggcaaaatacaaagaagagtgtgaagcccccatcactccattaatgttcaccagtcggggggtgggaggtgttttccttcagatttctgtgtatacatttataactggcatccttttgtgtgcaatgttaaccgccttttgttttcactaagcaatgtattatgttgagcacccattttgggggagtagacagcctgcaccatggtcagcccgcagacaggctgcacggatccaggcacctcgctggctccaaaacccacgaagtgaccccacccaggatgtcagagtaagagcgtgcctgcttggctaatgtctctcgcgtgcctgcttggctaatgtctctcgcgtgcccgcttggctaatgtctctctgaacccagagagcggagaggacccgtggctgggctgctgtgtgttgggggcttttgaggccagcctggtggccagctccttggcactgccagttgcaggggctaaccaccttgtgagggacagcccgcttcccccggggtctcttggctcttcctctctgccgagttgtgacaaggtatgggcgtggtgaagcgagagctcccctctctgccagtgtccatgtggccactctgtgacagcaggaatccataccccacccagccagctcacagcaggaatccatacccccccaccccagccagctcacagcaggaatccataccgccccctccagccagctcacagcaggaatccatactcccccaccccagccagctcacagcaggaatccataaccccccaccccagccagctcacagcaggaatccatacccccccaacccagccagctcacagcaggaatctataccccccacccagccagctcacagcaggaatccataccccccacccagccagctcacagcaggaatccataccccccccagccagctcacagcaggaatccatacccccccaccccagccagctcacagaaggaatccacacccccccgcagccagctcacagcaggaatccatacccccgccagccagctcagaacagccctgggtccctgttggtggcacttctgttcccctcctgcctttctgagtgtagaacttcttaagagctaagatccagggggccaacccagccggtgcagctcatggggaggaaccctccaggcagctccatgcccatgggctcaggatagcaacccatcatcccatccagggatggacttctctaaaacggccctggacccacccagaagatcagggacaagtctatcagtaccaggacagtctggaagtttttggccatgcttaaattagttaaggctggggcctggccacgggcaagcttgcctttcgcacaactgctggactccctgctgagcatgaccacgggccatggggctgagatgttccctgatggaatatgccttggagagcctcgccctggccagtctgatgatcccattcactaggctgtttattgagtgcccgcgaagggctggcctgggctggtggctgtatagacatctcattcaagttacacgagggtgctgcagagggagaaactgaggcctggggtctcgcccgggggggactcgggatcagacagcgctgacccctgggcccctcaaagtccaggatgccctctcccaccacctggccagggtctaccatggatacataggtatgattaacctggaacacaccacattattttctcaaacactaaatatccccaatcacaacagcagaacttcaaacagcaactgtgccacagaagcaaatgaagtcagctgacccctggggtgtggaaatcagacggagtccagtccctcccttggctgctggcagggcaggtggaacctgggggatgctggcttcctttcctgagcgtgtacagccctcagctgttcctacagccctgagcttcagcatcgcagggcagagacatggggctggggccctggggttacttccagggttgggtggtctgtgactctgtggaatctagtgggtgcctcagggcgggggcctagtggacaggctccggggcccccaagtggcttccagcagggcatggcacccctatctcacaccccctttccatgttcaggggattttgggaaagggcctggtaattaaacccttttaaagcccactggtcctgggcagttgtccagggcgtgggacccaaggcctcctggtcctatctccctttgcctttcctaggtctctgtcactcccgggcaggaggagacagtgatgacgggaaggaggtgaggacagggtgaggtcagccagcccactctgatagcgcctactgcatgcaggggtccggcaggcttcgcaggggaggcaggggagcctgagacccaggggtctgctgcccatgggaggccccagcagggtgacagcaaggccctggagtcttgggtaggaggcggagggcctggtgagagccccacacataggtgctccagtggccagccctgcaaatgaaacaggaggctgggaacagggcgggcaggggcccgggaggatggggccaggcctgcagcttaaaaagcaggcatggatgcgtcttttggctcctcagagatgctctttcggtccagccaacgacctgcctacgacggttgtgcctctgccccgaggagtggtgccggggccaggctgcagacccctggagctggagggctgcaggcggctggcccggcctcctcctgggtgatctcatttccagggcagcccctcccctccctgcgtctcagctcaagcggctccttccttggggaccctcgttagtgggagaaacaaaggccagttgtcaccaggagctggcgattcatcagcctccggcctgggctccccctcagggagtgtggtggctgtctgctgggggctcggagctgggggctggcagggcaggatctggtggggcagtgatatgggtggggtgaaaagcgtccccccattctaatcttcgggggaaagaaaaaatgttttaaaagtgctgcccccccaccctccgtccagcagatatttttctgggttgtctttggtgcttcccacagcaaaccctaccaggctccctcgtgggtagatgcccctgagccttcaaggggccttcgtccccggggccgcggattcatttactgataggtaaaccgaggccctgggagggaagataattttttctaagtatagaaggactgagatgtaaacaagtatcctggttgcccactagggcttggagagaagccgctgacccggtggcctagctgggccccttgaaaatagcgtctgtgagcattctgatcccacagctgtgcccagtggggaaggcggagactggagctcccagttcctgccctcagcaagctccgaccgtgggaagacacggccagcccagggctagaggcacatgcaggttgctgcagggtgcagagaagccagcccaggcagtgtgtgcatgcgtgcatgtgtgcgtgtgcgtgtgtgtgtgtgttggggactggggtggagatgggtgagctgctgagggccacattggagcttaggcagcaaggaatgcggagtggccaggtgtggatggcctgcaacagcagtctctcctgtgctagcctggggggctcttgtgggaagagctcggagcgggcaggagggagatgatgaagggaagggagggagggagggcctggtgagttttgctcaggagtttggactttatcccaagggcagtgggcagcatgaaagagtttttaagctgagagtgtcagggttgggggcagggggtgctgcctgcttaggccaggcgaggttgggaacaggctgacggagagggggtggggccagggcctttggggacctagccacacgtggctgtcctgaggcctcctcggggaggatgacagcctcatcggaccctgagctgcagcctggagccacgccaggccctccacaagccaatgagcggaacaatgtgtgccgggctgcgtctgcacccccacttgctggcagtgtgggggtggagggagccgcattttaaagtacagtttattttgatgcaagcaccgaggggcgttaggcaaactcctgggctcagttccccatccttcaatgcaaaacgactcttctttacggcccgtcaataaccgctgccatctcctcgccgccgcagaggccacatagatcatatttaaaccacactggtggatgacagagacgtacggatatttttaatcccaacagactattacggttcatatcatgtctgtcaaataaatattatgaatcatttcccgttatctttatgggggccgcttgactacatcgggggactgggctcggggccttcccctgcacatccatccccctcgtatgtacacatatgtgtagggggagatgtatgtagaaagtgtcgataataaatgcccccgataaaacacataatctccttgcctgatgggcgtctgggggtgcacggtggagaggtgtcagggaggggcgtgccaccttcagagccagggaggctgggctgggccccaggctgggagcgtcagcctcagcctgtctccttagctcctgtgagacaggctgtcattctatttccccgtagtcatattcttgtttctgtgattagctggttcttttctctattttatagaagagactgatgtccagagagtacccttgtccaagggccatgtaagagttggtggcagagccaggctatggcctcttcctcctggtaccttccccagcaccttgttttccaagtctgttacctatgtcccttctctctggactttggtctcacctggcaccggctgctttggctggccgacctgtgccatgagaagcggggaggtggtgtggctcattggaggctgggggcggaggtcggtggttgtctggggtctttcctgggggttctgaccactgacctcagccctgggtctggggactgtggtgccagagtcaccacacggtttggagtcagtcactgctgctcttcgcctcagtgtttccatctgggaaacggggaaaccagagtcttggtcagccggggtggggttagaggggatggtacctggcagtgtgcagcagactggcacctcggaggcagcttggaaagctcaggttcctcctctccggactctcagaactgttcctgcccttctttgagcatctgtgaccccttgcggctggcgctgggattcggtggggctctttggtggcccctggagggaacccactgtctcttgcctggagctgcactgaaatcctggctcttcattacaaaccagctcctgtccccttaagcctcactcacctgaactctttggctcacgccaccattcagctccccagagttctggaagtaagaccccagctgatgacggaggcagcggctggccttcggaggacctcacctttctcttcccctgcactgctttgggtttggggtgtgcagggccagccagctgactgctaccagggcagacgctgtcagtggtgactgccctgcaggcctgcaaacattttgccagagggccagacccaggagcagaggggtcctcttctcttcctcctcctcccctcctgtcctctcctctcccctccctcctatcctttctcttcctctccactcagcagaacagactggagcccaggtgtggacaagtggcttgagtgtttccctctagactgatggagagacaagctatgactgagaaagggggttcgggctgggacccctgggcctagtcccagttccatgtggacctgccgggtggccccttgcctctctgagctttcggctctacttcccagctcgagtcatcatcggtcaccacagacaaaaggtgttgtccccaaaggagccacaacggatgtgagagagagtccccttaggctgaggtgcttggggacagatcgggccaccttgcccagcagtacccaagcccttggcctcccttgttggaggctgagctccccaaacccctgtgaggtcctgctagtgaccagctcaggaccacagggaacctctggaagcagcttagagccccgttggtgtcctgggaacttctgggagcagtccacccagacgccagcttcctcatgctcagccagcacagagaccagcctttaaaaatattattcaacaagcaattcccgggactgtttacaagactgagccgagacaggcatatgaaataggccaaagtaccttaaaaagcgtccctcagggaaattaaaaaaaaaaagacccaaacaaaaaaacaaaaaaacaaaaccttcttagatcgcaggttgtgaataaatggatactactataaaaatagttttggctgtagcagcacatggtgggaaggctggggtgtttttttccatggctggctcagacctggccatttcatatggggcagccactatcccgggaggtttcgtgtagaatcatttgcaccaaaaagctccaaactgagggggaggataaaaagtagtggccacagaaataacaagcggcatcgtcattttccatcaaggacctggtgtgttttcggcggccgagcacccaggcccctgccccatggaagagaagggcggggctgagagccattcaccgtctgtgggcacagaggctggatgtgagcccagatctgcaggactccggactccgtgcgctctccacgtggtctctagagcaggggatgacgccttccggtgtttcttaggaacagagggcccttctggaaccttcagccttcccaggaggaacccacatggaaatctgtctgcatgtgcctccccgactccaggcaccaacagctcctgagtcttgagttttcagggacaaggagtgagatgggggtggggtggagagtccagcatgccacaccgcccactattgggaggtgacctcagacacttcagcccagccttcccaccattgcctggcgtgtcctgacctgccgtccgcggcctgctgctccttctctctgcaggccgctgctcagccggccctgctgcctgggcggccactgcctgatggaacctccctgctccaaaacctgactcaagaaccagtgatcccaaaagctgcctgagccctttggctggatagagccttgctctccctgcactgagcataggcgaacggcctgcctaattcagcgtcatttcatcatcatcatcatcacaataactgtcacaccgagctcgtcctcccgagcgcagactctccatattatctcacttagtcatctcagtgactcagtgaggagggagtggttgttcccactttacagatgagaaaactgagatacaaggagggaagtgacccagctaggccacacggttggtaggaggtggacctgcaatctggcccaggccttgtctatctgggactcccccccaaccccccaacctgagtacagtcaggaggggcccaagcagtcacagagacaggcctggaacgcggcgggcacatggcacttttgcagtgtatgttggtgcttacgggggctctttctcagtcctatcctttgtttgccgcccccctccctggcaggaggaactcagttttagaagggcagtgggttgggccggcatgccatgtgcagtggggaagtgggtctgttgtggctgtaaccacagtgggtgaggaccaggtgtcaacagtggccctcatcccggagggagtggggcaggctgcctgttggacagggtgtgtgaatagggggacggggtggcctttggtaggggcccaggggtcagtgaagagggggagggggagagggctgccttgggctctggctgtgctgggggtgggctgcccaaccagggcacttctgtcccaagtggaaccaagacctcccaccggaacaggccaccggagccctcgtggaacccagctccgggtggcccgacttgaggggcacccaggcagcaggacacctctctggtctcgggctgttatctttgggccgtgtcatggctgtccacacgcggtcatcacctcctcacctccctccccattagcgtcccctgacccgggccaccacgcgcagcctgcgtgaatggtcagtccctgtgcctcgcagcccgggcccttaggtctaggtggtcagcaagctcgcggtgggggtgcggagggagggcgcggcggggcgcctcggcgcctgctcaggaaggctgggcttggcggcgcgcaggtagctcacacccaaatccgaattccagccgcccgagacggcgggcggcgggcggcgcgcggcggaggcggcccgagctgtcccggggcaggagtgcttcctttcgttttcaaacaaatcgtgaatttaaaagtcaggcagagaactacccagggtataaaaatagccaccggccacaaagtctgtgtccaactccgggcagcgcctgcccagcctggtgcctttgaagaggggtcccaggagtgcgggtcgatgaggaggcgaagcgcgcacccctcctcgttcccggtgggctcgtgggtctctccgtgggggtagggcgtgaaagtgtggggtggaccgggggtagcgtccggaagacgaaaccttccccggacgaggagcttgtcctctgccgttggggcacatcgccactcccgggcctcagtttccccacgtgtccgccgcggcggggtgcgaggtatgggtgccgcggccatcccgcccggctctgcgcttgcctggcccgggccggggtcccctcgcggccaccgcccggccgctttgtgtggccgcgcagacaatggcccggccgctgggctcccggcccggctctccgcctcctccgggcccttgcgcgcaagtgtgtgtgtgcgcgagtgtgtggcgggcccggggagggagttctgctcccgcccccgcccccgccccgctccctctgcgccccgccccctcccacgccgcctcctcgcggctcccgggaacccctggcggaggcgaactcgcaagtttgcacggcgctctcaactcggcggccgggcgggcggcgatcgcggggcggcggcggcggaggggggcgcgctccgggcggggctgggcgggcggggcgcgggccgagcggtggcggcggcgctgcgccgagtcagcgcccgtcgcgggccccccgccacccccccgccggcgccgcagcgccgcggtcggagcggggcgcgggcgcgcggcggcgggggcgcgggccgggcgcgcgcggcggcggcgcgcagacacaagtagtttacattgttgggcgacttttgcaacaactcgccgcgccgcggcctccgcgcgccgccgccgccaccgcagccgccggctccccgccgcccgggcccgggccggccgcgccgggggccgccgcgcccgccgcccgctgcctgcgccgccggccgggcatgagttagtcgcagacatggacaccaaacatttcctgccgctcggtgagtgctcgccgggccgggcggggacggggccgggggccgggggccggcgggcgggagggggccgggggcgcgttggcggcgcgcgcggggggtcgccggcccgggccccgctcggacccctcgccgaccttcgcgtgagttcgggcgccgggcccggggagggtcgacccggggcaacttttcgcggggccggggcggggctgggcagcgggcgggcggcggggccggggggcgggtggcaggttcgcccgggacgaggaggggtctcccgctcaccggcggccgcctgcgccccggcgcccagctgcagccgcgccgcacaggaacccggccggagcgggaggagcaacttctgcgctccgcggctccggcctccctggcctggggaccgggacggcgcgctgggccccgagcggcctctgcgccgcccgcccgtcgggctgcggcttctagcaggccgctggcccttgggtgtgtgtccgcccaggaaacagactgggaccctgttatccccaaagcagcccacgcccgggtgggcagggtcccccggggctgtatgaacagaacgtcagacctgggaaggccccattccagaaatggggcccctcactctggcacccccgggtgttctcccaggctggctctccatttgtgagcaggacagcgcagaggcgcgtagggtcagtttccctcctcctcctgccatcccgcccggtagcttcctatcccagactgcccgccaactccaggcccagacctaccgagaagggggagagggcatggctggggcccccacccattgccctcccaagggtttggaagctagtgagaagggggagactttataaattagctccgggaaggatattaatttggtggtgggacggcagccaggctgtcaggccgggtgaaggatttgtgctgaatggaaatcgaaacagctgattatgaatgaagcccccgccatccgtagcccctcctgcccaccctccctgcagcctggggtgcagcttggccaccccaggaggtgctcagaagccaatgtagctgcagggatgtttagtgagatggggcatcaaggggagccagcatggacctagcccctcctggatgtgagggtgagagtctgagtacctctgctactcacaggcaggtgtgctgccccgtgaccggggcaggcggtgggttccaggtttgtcagacctaacgcttactccctgcctctgtcatgatggagtggtgggctcgaggccttgaatgagctccagggctcagcctccaggggtgggcgctcatgcccattttgcagatgagaaaactggctgggagaggctgagcccccaggatacaaggtggtggatttgggattagcacccccagctcgtggtactgctgagtgtgaggcaggagggaatgctgcgctgtctgtgaccgagtgcagtgtggagtgggctggggctgcctttccctgttaaagctttgcactcacacatgtgcacacacacatccacacacacagagctaggctctcccagacgattcctctggaacaagaatgctcagctcagtgtctggcccctggacgtggcaggggcctggctggttgcacttcagctgagtactgagaaccgaacaggtccctgtttctaatgctccgggtgggacagggatagtccacggagttggtggatgtagggcgagggagcaaggggtgcccagtcgccatggtggcttgctggagtccctgtgaggaggagaggtcgtgcctccgagccactgccccagggatctccctgggcactcccctgccacaaggaagctaggagtcttctgttctcgagcagcagctctcccgaccggcccatggcctcccaggcagcccacgccccagggctgagcagagagccctgggctctgattacattttattttttttctaagcttgtgaccagctctgaagtccagagcagtcgaaggtccatttaagcggctacttttctaagcccttttgtcaacacagcctaatccctcctcggggtgagtggtggtggagggcctggcttgtcttggcccggctggccgaccggtcagacctggagctgctggggagactcggccaccccttacagctgcccagccgcttttggggtctggggtagagagggcttcctcctcccagcattcactaccgctgggcttggtgggcagggagaggatcccagtcggtgtccaccgagccgctcagtgagggcagggatgagtgcagcgtccagatctggaaggaaagcaaggccgagggactcgccagaggcagccccagcttcctggccctgctgcccggggctggccgcgctcccacgcctgccggggagaaggcccccgctggccttatcctgaatggtgggactcaggcggagtccacagagtccaaaggtctcagaccacaccagaccccatgcgcctgtggagagacccggtggcaaagctgtaggcccgctgaccactcttggagttggggcacttgggggcctgggtgagcttgcagcctgtgtgaggggcttctggtaacatcagagcccttgggacccaaaatagagcacattccggggcctcccgaaataacagggtcatgtgactctcaggaggctgggcttggagtcccgctcgggcctgacgagggcgtcttttagcgcgggcgctgcccgacggcagggtgtttgttttggtaaactctggaggggccctgtttgttgactggggaggtgtcagggagagaaaaatggcccagtccgatggtggccctggcttgctagcctccaaccttgcctagggctggctgctgggcctggacccgagcatgcagctgtgaccctctgcccagatgtggatgggacgagctgggcccctaggaagggctggtggggggcgggtgctctgagtcccttggggtgtggggtgcaggttgagccggcagccctggtcacgcgggcagctgctgtgactggctcccggctctgccagcacctggtggttcttccagctgtgcctgtccttcagggcctgtggggggctcacctccaccaggaggcccctctgactgccctctcttggcccctgccccatctcccccgtggctgtgtgggaggtcgctgtcagtggtctttgtttcctcccctgggaaagggtgcctgcaggatttgctgtggaattactgtgggaacagggggtactcaggggtgtgcccctctgcccctggggcctggtcgtgcatgtggcagggggctctggcatcaggagagggtgggacagacctcagctgcatggaaggtggtgtgggggcggggtgaaagctttacaggtccacccagtgccagtggaggctgcctggggagtttcctttcttgggtgacgtttggttttgccatgggtcaaatgtttcagggctgggacctcgagtggtgagcaatgcctgtcctctggagaagagggcacagctgtcccagcagacacagggcagaggccctccccaacccccagctggctcagggctgggacactgtccctgggacccgggctttgcaagccaagacctgcccctccttcccttctctgccaggcttgagtttgtgttttttagctggctttggtggccagggccttgggttggcctgttaactggtgtgttttcataggaattggccatttgctgggctagggatgaggctggggtctagggccacaagggcctggggggctggcctgtggctgttgggggctggtgtccatttgggggtcaccttccagacctttgtcctgagattcttaagctgatcagtttcagggtgctatggtgtgggtagaggggtcaccctcctcccccctgcaccttgcccacctgcctgtatgtttccattttatagggtgcagctctgtctttcatccttccttcctctcctctgccccctcccattcagggcctttgttacctgcaggatggaggtggtggtggttttgcagggatcagcaccttcccaggaagaggttctgacaggtggtgtcccattgctgggcgggtggtcaggccacctggggttgggccttctgtcctcgctgcctgcctggtctgctctttggcctcttggggctttggctgtccatctgaaaaatggacatactcattggctcttccaaatgctggagaaggcagcctggtgtgttgtaggctggctgggagtttggggagtctgtttgtggggcgtttcccctatcctgtggctaggtcctctctgtgcctcctgcctgggtcaggtggggccaggtttccagcactggaccagaacaggccatgatggtcgctgggggctgtcaggtgtagaggaacagactcaggaatagaggacatcggggacactgaggtagccctttctgtggatataggcctgccacaggagagcgctcgctgctgctgggtccttgggaccagcccctgtgccactccagggaccctcctcagagtcccaagaaggcaggtggggcgagggaccgcggtttgcacacccacccgagcctggtgcgagatgttctgagcagttgtgccccagcgcctcacagacagggaaattgcgccctagagttacaaagcaattgtctagctcagcagctgaatgagcgtgaaatggagcagaaagcagctaaggaaaattggcccggccgctgtggggagagcgggtgcggaccgcgtgcagggcttgggtgtgtgcacgctcactgttgcacacacacagagtcacaggctctcacctggcgctgttggccgctggcccgtgtcctggcgtgcccgtgagtgagccaggcctcatggggtcccccaaggatcatggtgctccctgctgggtttgttggcctcctttttttctaaatctccccaacttgtccaggactcaccctacccccacgaaggtgccgatggctgcagcgggtgcctgctgcgtgccagggactttatttttgggaccttgtggaggtgtcacagagacaagcccacttagtggatggggacactgaaccctgggtgaggtctgtgggccagcctttgtgtcccgctgtggggcctgctttttctccggcacttgactggcgggggccgccttgagctccagctgggaggacctgtccccagggtgggggctctgctgcccctggtcctcctgcctctcagcatcctcagaggctgctcaccgaccaggctgggtctatgccccatgctggttcccaggagccccattgctggtcttggcccgagtgagtgaggtttttgttcagtggggaccctggtggagggctgaggtctcaccatgccagctctgtgccctgggactgggcatcttggcctcttgtgctggttgaaggccctctaaggagtggcgaccccttgatcctcactccagggttgtccttggcttggggtggtggctaggagaagtccccactcccaggtggaaagctgtagttgggtgagcagcagaggcccagcctggaactgtggcttgcccacctcctcatgccaccagggcagcactgtctgcagcaaattcctgaggtacctgggggagtggacggagtgagattggacccccgggtcccagggcagggcagggtaggggcacagttctttctgaggtcctaacccagcacacgcggcccaccccatgcatgcaggcgtccgccgcagccttcccagggtgacctggcagagccttgacaaccctggctggggaggcggggattgctggtgggcttgtccacacgtggcttagggagcgcccgctgggtgctggcctggtcctgctgcctgtggaggaggggtgggggaggggtgcccagaggtagggacagcaaggtctggcctggagggggtgaagagggtgaggacgcaagggtggggttgcagggctggaaccaggagggggttcacgtgtgaggtgaggctgggtagggcctgtgtgccgggcgtaggtgcatgggtgcccggagactgggggatcccagtgtggtgctcatggctggaatgaggccaccagtgctgtgcagagggtggtctggaggcagccaggcaaggcctggaaggaggaagtgactctctccaggtggctcactggtttcaggtgggccttggggcccctgtgaatggccttgcacccttgccctggctgggctcctcagcatggcagcctgggaaggggggaggattcctagcatcttcctgggggcttaggccaggtccctgggctggcctgggggtcgtctttcccgggcacgggtatgggtgaggcaccttttccctggccctggctccggccccccctgcactccccaggctctggatgaagtagggggcaggccgtccagggggagtagagcagccgggcctcttggggccggatcagggatgctgagaccatggaggggaccagactttggggctggggagtgggacattcaggggtccttcaggggatcagagcctctcagggtctctgtgtgagaagttgccacggggtctgtcctgcacagcccacatctgtctttgatgataggcttcagccccagctcctcttccaggcactgcctgctggggtgagggatgccgggaagcccttggtcacagtcctacctctggggtgacccagaggccgtgcctggcctccccgcacctctgttggccctctaagccatagtaatttccagctgggcctcggtttccccagctgtacccggggccagggctgggggtgatgggtgtcggcgcagactgctgccgtgcgtgcggggtctggagcctctggcgctgaggggaggggagagtgagttgggcctgggccaggccgtgtgtaaatcctccagccgccatggataaaccctcggagttcaaagacaaccccgggtgcggccgccggctgtaatgaggttactgattcaacaggcttcctggtgctgcagcccagaatgcagtgaggctgggaagccccggggagggatctaagtatcctgtaattgaccaatttagcttaagtgtccacactggccctgggcagaggtcaggcagtgacagcacaggtggctggagtcgctggggtgggctcccaacagctgctgtgtccgagcccctctgaatcgggcgctctcgggcctgggcagccctgtgcctctgccgggactcccgctgcctgctcttccctctccacctgtgcaggctcagccttccttcccagccagagcccacctgccatccttggtgcccagcagcccccttggtacagggcttggggtggggctgcagctttggacttggtgcccagagcctgcattcagctcccgctggcaagcctgctgggtctgtgcctgactattgcccagtttcctcccgcctgagggccgtggagtgatcccacgcctgtgttaggtgttgaggccgctgctggtggaggtgcctggcggatgggagctctccacgtgccagccacccatccagcctcttttttcccaggcttcctgagggcagggcccttctgaggcgagggcatccttgcagcacccagtacaggtatgcaggaaggactcgcttgacttagagagtgggatcagaagcacctctcctgcctgtcagcagtggcttcagtgcctgtgcttggggaggatgtatctggtaccttggagagaggctggcaggccgcatccagctcctggtttcctgtcaacccaggcctggtgtgcagagggccaccaaggtgacagtttgctcctcagaaataggactgggcattgggcagcagtgtcattgactgccgcagtgatagcatgggctgtggcggtggcagtgtgtgctgagccgtccctcgaactcagctctctacatggtggggctgctctctgaccaggctgctgtgtagccctgggcaggtcccttcccctctgtgggcttcagtttccctggggccctctggctgtcaaagcctctgccttgccttcttggcaccctggctttgttctgatatgctgttggccattggtcagggtggcaccctggggaccagctccctgggaaatggctctatgccctccccagctgaggggacaggacttgggctggggtagggcctgggttgctggcgtccaggaagccgtgggctctgagctagccagggtgggtgtgggtctggatgtggactgggcatgttgtggtgaagcgctttcgggatgtgcagcttataatggggaagaggtggcctgggggcatggcagagcagaggcagtaggggccacagatgagtggggtcagtccccatgacggttatcactcaaggccaggctagtccttctctctttgggcactgaccttccttgcctggaaccttccatggcaccccattgtccccaggatggaggccaggcctccacctagtgtcatgtggctctgtagcctctcccacctcattaggcacctctcactgattttctcatgtctaaaactaactggtgaggtaggctgccccatgcgatgagtgagcgcccctctgagtcacaggctgtatggccctgggctagcaaattcacctcactaggcctcagttgtctcacccataaactgcctgggggaggtcagggaagcttcacagaggaggtgatgtagttgggttttgagggatgagtaggagtttgttgggtgggaagtggggaaggaatcaaggcagagagaatggatggattctttccagggggatctggttctagccaagggtatggggaagggatgcccgtgcgggcgtaagtaggggcttccctggagggtttctgagggtctgactgtgtgaccaggctcctctggcctgccccttgctggctggcttccaggtctgtgctggtggggacccctgtgagcatgaggctatggtcagctggcctgggaataattaaccctgggaggagctcaggctaggggtgggcctcgctgcagcctggccgcccccagctggcctgatgtcccctctccttcctgcccaggtctggagtgtgactcctaccggcgcccatgtgcggtaccccacctcggggccctggctcccagggtgtgtccactactgggaggaacggctggggcccttccctaccacctattcctataccccttggtctgtccctgtagtgccctgtggtcctgccttggtccctgcctctccctgtgggcagcttaggcgccatttgcccgggagccccctgtgtgagtgcaaggctattggatggcttctcgccctctccccacccggagggaggaaaacagctctgaccgtgagcagagtccacgggaggcggtggagctgcccctaccccaccccttcatggactttctgcccaggatcaaggtcgaggtgtagggcagggaggcggggccttcgtcaggggtgccaggtcactctgggcacagacagtggcaaggcgggcctggcaggcagcaccaccgcaccatcccgggcccagtggaggggtgaggactggaagggcagtggggccttcctcttccctcccctcagtctcctgggcacaaggtcagagccatccacccctctgtcctgtgtgacccaccttctcctgaggctgggatcacagggggcgtcaccccttagcggcaacgtagagctggtctccaggcccctgcagacagtgggcctgggcaatggcatgctcacagcccgggtcttctctgccacatggactttgtgacttggagcacgttccttcttccctcttcgtcttgatttcctcatttggaaaatagaaggaaggatgccaggcagagtccacggctggaagtgtgccgctgtgcccctgtggccggccggagccttggtggatgtcgctgaatgggccctgctcctcttcccgtggggccctcagacctcagagtctttttcaagacagggctggctccaggcaccccctctcatggctcggagctggctctggatctttgtggctgcggagcccacagtgccaggtgccatataagcctcatgaagtttgtggcacgaattcatgtggtcagccaactgatcccctccgcccctcaggttcagaaatgtgacgggtgagcccgttccttgcaaagttgatttctcaaatcgtgaccatgacttgaatccccctcgttctggaggccggtccagtttccagggaagggaagtcctgtgtgtctagctcggtgtcggtttctgggagtgggagtagatggagggtctgggactgtcctcgaggactctgtgggccagctggaatccctgggggccctgggtgggagctgaggctgaggcttaaggctggggggtgcccctgcctgtggagaggccccagcagtgctcagcgtgttggagatgtggctgccaccggctgctggacagagcctgggagtccttgaactcagattcccagatcgagagagggaggggtgctcagccccagtgcctgcccttgttggggacctgggtccttcctttgctggtaagcatgtcttgttgaaacttgtagcagtgtggggggtcaaggccagccacgagggaagtaagcgcctcccacctgcctgctgtctgtccgtccgctcatctgtctgtccgtccgtccatccacatccatcaggctcctcctggccactaggaaggcccagtagagccaggcttagccctcaagcgggcagtagtggtctctggggtcagatggcctgggatggaccccagtgctgccacttgatgggatatgaccttggaccagatgttttaaccctctttgggccttagttctcttacctgtaaggtatccctgaccccagtctggggtggagatggtgtgtgagcgtggtggtgggaggaggtactggagacagaagggacacggaggaggcattagcggctcaccctggcatgcagagagttggggcttttgaattgggtcatgaaggatgcgtaggagttggcctgggaaaagccaatgtctcgtcctcacacctgtgtcttcactttgcgtcgtcgaaggtttccagggcagagctcgctgactctgccttcccttgcatcagacagcagtgcgcctccctctggggggtcgcccagagactcttggatgtcctcggagcagacgtagaatgcaaaacttgaacctctccaaaaagaaacgagacaggcgggtttcgttcagttcaggtggccgcgtgccagccctgagaggtggcgggggagagatgggtgactgcgcccccagtgctcacggagggcccctctgtccagagccgctctgaggatgcgacaggcaggtccttgccctcgtgggctgccaggccagcgggggagatgggcggtcagcggcagccacagacgacgtagggctcaggaagggcatggagggaaacgctgggcagtgaccacagggagggacagaggtgtcaggagccctgacagaagacaagcatgtggttctgctgcactgtcccggggcctccctgggcctccctctggctggtagcacgggcaggtgtgtggggcacggccatcgccaggcattcgacccctgctggctcattcttggctccctgtggctgccgtgggacatggtttctaaagaacaaatgccagctgtggcgctgaaagggcctcctcatgtcagggtgcccctggctgcaggacacaggccacttctggtcccagattgacgggcctccagcccaagtggcacctgggtccctctgacctgggctggcatcccccaggccatggggtcacaggggaggtcactgccactcttgctggctgggagaggcgtgtccccacgtgcgtctggccgcagtcagtggccaggacctgcctgcgtgtggacagttaggcctcctgcctaggaagcagtgatgcttgccggctgctggtgggggcaggggaggggctggctgccggatcccacgcagcctggacgtggctgataagctgtgaactcattatcggagggggcagctggtgcccctctccctgcagccggcaccccagccttgccctggggccagacccctgcactgtgcccagccttgcgggtgagactgggggagcgagcaggcctctgttgggacttgggagtctccagggtcccccagagcccagagatcctccctccaggactctggagacagccgccgttctgccctccctgctgacccctctgccctccctcaggtctgcctggccgcctttctgagaacaaggagccgattgttgtcaccactgctgtctgcctcctgctgtggatgccttgcttggcgctggcagtgcccacaccggcagggacctggggacttggagccggacctaggtcgccggccgtgtgcctggtgtcggggcagggctggtggtcaccccccctggggttggccccgtgggctcagggccctgcctccctgtgccctgtccgtagggaccctctcatgccctctggccagcctggagagctcttggcagaaaggccaggactgaggtggctggcatggcgcctcccgcgctgttcctccctccctgcctggccttcaggggcgcgtcgtcctccccagaccctcctctgtctgcgtgtgagcccgtgagcctgtgtgggcttatgtgtgtggctgggattccagccagggtttgtgcgcgtgagcctctgtctgcgtgtgagcccgtgagcctgtgtgtgagagtgtgtgggtgccatgcctgtgtgagtgtgtgcctgtgtgtgagcctgtgtgtgggtgtgcatgcccacgcccttgtgtgagtgtgtgtgagtctgtgtgtgtgtgtgtgtgagcccgtgtgtgtgtgagtctctgcatacccatggccttttgtgagcctgtgtgtgtgagcctgtgcgtgtgtttctgtgtgagtctctgtgtgtgtgagcctgtgcgtgtgtctgtgtgtgtgcctgtgtgtgtgtgagcctgtgtgtgtgtgtgtctctgtgtgtgtgcctgtgtgtgtttgagcctgtgtgtgtgtgtctatgtgtgagatcccgtgtgtgtctgtgcacacccatgcccttgtgtgagcctgtgtgtatgagtctgtgtgtaagcctctgtgtgtgtgtgtgtgtgagtctgtgtgtgtgtgagcccatgtgtgtgtgtctgtgaacatccatgcccttgtgtgagcctgtgtgtgtctgtgtgtgaacctgtgtgtatgtgagtgtgcacgcctgtgctcttgtgtgagcctgtctgtgtgcacccgtgcatgtgtgttcctctgtgcacatctgtgtccatgtctgagcctgtatctgtgtgcacccatgtctgtgtccctctgtccctgtccctgtgtgagtgtgtatccgtgtgcacttgtgtcctcgtgtctccctgtgcccgtgctgtgtcggcatgtgtgcctgtgtgtgcttctgtgtgtcttgtgccccacaccttctgatggcttgtgcctgcgggtccaggtttgagactggccactgcccgtgctgtccggctccctccttagctaagggtcctgagggctcggggtccaggacaggagaatgagaagctgtagggggctgtggagggctgcaggcagatatatgttctagaaagactttggccatcgtggggatggtggtttggggcagaccagtgatgccacccactgacctttcagccagttcccaggaagtgtcacaggggtgataattgtccagccaggagtgagggccgaggggctttaggaagtgccagggagcactctgaagcagtatgttttggtctaagtggggctcacgtggcaccggctcactgcctgccctctggcctacagcgtggcaggtatcaccgaccacccgaagcactcagatccctttctgcaggcacccaggcagacggtctcggtgcatgagcctcgatgcacgcctcggcccgcagctgccttcttgagcaatgccagcagtgcctaagccacatgccgtccaggctgagcaggtagattggatgtgtgagctgtggcccaagcggtcctccctggccctctagctggggtgtctcagctccgggagcaaggagcctgtcttctgcggaattctgcgccctgggagaatgagctgagccaatcctgaagccagggtcagtcacacacgctttggtgcgaatgagcctcatgtgaaccctggaaaggcctcgcaggaaaggagaggaaggaaggcttcctctaattgtgtggatgaggaaattgaggtctgagagcggcatggctggcaagcggggcgagctgacagccaggctgtctcctgaccctggcctcgtgccctcacctcttgacggcccaccttggggcggagtgagagcacagatgggagggtcctggtggggacagggagaggtgggtggctggagctgtgaccgcaggccccgccgtgggtggtggtacctggagtgtgtgcccagcacagcatggcacgctccctcgttccctgcaccccagtgctgatgaggaggccgagctacagataggggctcagctgcttgcccaatatcatgtggccagttaacagcagagtcgggatttgaacccagattcttgggactcttctttgagccacttccagcctggggttctggcgtgtggttggagtcctgggggctgctagggtggggggacattcctcctctgggaggaacctggagccgagccctccctgctggctggggaggggccttgcttcctacacaaacaaccaggcctggctggagccattttatttttatttcctatttttacttccccgttggctctttttagcaactctgggtgagataggcccccgccctccagtctccacccggcttcctggcccaggccaggaccttggaggaggcgtgggcatgggtggcccagggttgggctggctcgcagcttggccggcacacacctggtggcagagctcctctctttctgggagctccagggcggctggcctcttcccgccctccatggggagcaccatggggcatgcatggtggcaggggaatgtcttggtgtgtgactgtttgttgccacccctcctctgggtcttggcctgaggttggagtttgggaggtagaggcactgggcggtgtggtcttggagctgggtgcgtgactggcagcgtcactgcctggggcctggctgggcagggctgggcttgggtttgttgaggctctgcccactactggcctggccccacttgctgagggtccgctgtgctccagggtctgtgaagcccaaccctgggggtaggggctgtcagagcatccggctagctggagcctgcctgtggtgggtgttgctggctgggggacatgaagaccccgaatgaggaggcgtctccctgaaggcgctctgctgggcccggggtgggggctctcgtgctggcatttggtgggtagtgagttctgaactgtgagatcaggctggagaaagccctggacccactgtggatcccaggccagagtgagggcaggggcgggggtccgggtcgaggactagcaagccacagtgcaccaggtgccccggtaccagcttgtgccaagcccattgccctcccagaaccctgggggagggagttgccctcatttacagagggggcctgggctcagagaggctgagccgatcttcaaggccacacagcttgtgggcatggaggggccgatccttgccctttccctgccaggaaactgaggcacagagagcaggggtcccccaggtggtcaggccccagaggcttgcacttgggatggcgtgctgtgcgccctcttcctgccatcagcggggggcagtgggttggtgcaggcagagtggtaacagcaagctgtgggcaagggactgcttgggagctgctgtgagcccaggcaggtggtggggctgcggggctgcgggaggaggcccctgtggttcccacagggccatgtgtggtctccagggctgagatggctggtgtgggccgccctgacctggtgggtttgggggaacctggccccataggagagtggacagcgccgcggaggaggctgcctacctgccttcctggcccttcctgctctggctggctcagcaggttgagcgcaggtggtggctgtggccctgccaccaccacagtgaccttccctttgtatgtgagtgatgtgggtggcatgactgcggatgcaggcacgtgtgggtgctggggattgtctggtaatcctttgattagaggccaggaaacccaatcccgcagcctaggcagtggggggacctccttctagagaggccccagcagattatgggattttcacctgcccagccctgggaggtgtcttggacccagagcatttggccttgggaggtggggagggggttcctgccctggagccagggaagctgtctgcggcccacagttcagggccccacacagaccttttacatgctgtgtgacctggggcagcgtgtctctctctctgagtgtcgactttctcatctgtgacgtggggtgagggcacttgctgcccaggtggttgtgagggttgactgaagtaaggcctgtccttcagttcttgcctgggagcagggaaggccctggctggggttgcctctgaacctcagtgtctttgagggctgggaggaggagtttcttcttctgggttctgggggttcatgcaggattgcccgtcagcatcctgcagcccctggaatagggggcgctcagtgtagggcaaaggaacgtgaggagggcatgagtgttgtatctcatgggaagaagcatttttttgggaggagtggttgcaggggcagctagttctggaaccatcctaggacctagaaattgctcggggccaggaagcgagaccagtcactgggtgcaaccttgacataggcttgaggggtcacgtcccctgccctgtccccatcttgctcagtggccagaggagagaccgtgtgcacttggtggactgccacgggcctgggggcctcgggaccaaccctccatccgcccgtccccagccgggcgcggcactgagctgagggagcctgcgttcttccttcaagcagaggatcttctgcaactgtggggaagagtgtttcttcccggaaggcggggccagctggctgggtcagcagatgggctcctctggcgtcttctcaccttctggccggtcattggccctcgtggccctaccacagtggggtgggcatctccccataggccctccccacaggatgcagcccttcctcatggggcctggtcctgctgaggttcccgggggccgtgccctatgtggccctacctctgtgccacctctcaaaccgttgcctctgcctggcgtgtgtgcctgctctgcccttctttttccatccttgtaggcctgagtccagcgttccctgcgcttgaagctggccccaggaacctggcaggccagggcccatgcagtacaaatgtggacaggtctgcccccaccctgccctgggcctccctttttcccagcctcctctggcaccggcatgtgcggaggctgtggtgtgtctcctccctgggtggaggagtgggtagggggctggctttgcagcttggggtctatctagcctggtgtctggagagacttgtggggtgcagcttcctgcccttgccgccggaaggggctgagattggggtcccgcccctttgctcctgactcagcagctgcagggtgggggaaactggaggtttcttgacaaaagccccaaccctgggcacccgcccaaggcttagattcctcttaaaaaggtggaagtggagtccttggttcctttctctgggggctcccaacaggaggttgggacggggctggatcccaggccctgggccctggagccctctcctccccacctcccgggcctctgagaactgtgcttctctgctgcgtagcgccctctgtggctccccagggtggagttctcactgctgcctggccacggacgccccttcatcctcaggagccaggcaggccccaccaccataccccttagcaaccagcttcccactctgaccggtgtctgtctgtgtgctgccttccgtaggagactttctgagcttaggttccctcgacgctctatgggcactgggcttcctgtcccaacacactggtggtagtgatgggacgcagcctctgtgcgggccctgtgcctggtgtggacccagcagagttgggcagcggatgtagagttggggaggggagcagtgacaaccattcagagtgggctctgcctcctgcacccctgggccgtgtgcctggggacagcggccagaatcacgaggcccagtgctcgagctgcagtgtggatgggtggcttctctaccccagactccagctctctccagctcagcgactgtggcagcccctggtctgctgggaccactgccagtggctgagaaaatgaaagtggacgtgccctggaggttatgggcttcagggtccccaccggattagtgaggataacgtatccccctctagctggtatttgcacagcccacggctgtgctggctctgtggagggccagttgtcaggtgctcatgaagtgtagctgctgggaaggaggtggaaagtttgggccaaagccctgatgggtttttgtgtgcccttgggtggtcagcagtgggggtacctggttggttcattgcacttcaggccctaccctggcactggcatggatcctcgtggagggttctggagtttggggttggagaagcctcagccctggccttggtggcctccatcaagtagagaccaaggccacaggcaggacgggggctctggcgggagccgacatcacatgtctggcctggctgcacccactaggtgttcatccaggagctgctggtagccccggcagaggctgtcccaccagctgcctgcctccattctccataggaacttgtgaaacctggaaccgaaaaagagccaaggcaggagggagcaactgaagttgaaattagctgctgctatatctccccagccccagccgtgccattgtcagtgcaaaatgcatgacggggaaggtgaaaataatcaaagtcttgactctctggcccggctcattcatgactaaacacgtgtcagttcccggcacagatgaacatggaatgggtacccccgggtgggactgtggctgctcctgtgtccagatgtcccctcctccaggaagccctccttgatttccccattcaggaggtcctctcctatacctgtgtttcctgatacatgtgcgtcttacggtgttcatatagggacagttgagagtcggggcagcagcctaggccatttctggggggtggggtccaggcggggtatggctgacagcccagagtggtgtggtattggggggccacgcagggtccctcggctctaccactgctggctcattctaagcacctgatcaggaccatgccgccctcctctttagttcctcctgttccgctgtggtcctaggggtggagtcccagcccgggacctggcgttcatccttgccctgccctccctgccctcccgcggcttgctggggaccagctgtgctgactaatgtgatgtcttcaagcatcacagctttgcacttgctgtcccctcccccaaatgcccttctgccgttgccccttcaggtctccctcggctgtcggctcatccaggagcctccccagacccccagctgccgtggcctcacccccactggtccttgcagctggttctgcttgttccttctgagcactcaccaggtcctgccagtggctggccgttcccgggcgtgttgggggctctcgttaatcttcttgaccaggacctgggctctggggactaggggtgcccagggactgcaggacctgccctaggtcctggcactgcccagcttcacattagtgggggaaagaagcgtgtgtctgggtgctgtgggtggatgcccccaagggtggagcccccattttggggatgtcatgtaccttcaccccactgtctgctcgcacttgtgtgctgctggagtctgaagcccagggtgggacaaggagctgcctctgagggagggtcctcctggaggcccaggggcttgaggagcccttgtcgggacagtgtgggttggaagagtcacaggtgggactggctgggaccccaccagcgcttcactgctcccatcttacggagggggagggcaaggctggtggggggcagcttgagaggcactgcttccaggcaccacatcctggacctggcccttgcggggagggcccagctgtcactgtggaggtggcaggcaggtgggagtagggtggtggcctttccatcactgtggaggtgacaggcgggtgggagtggggtggtggcctctctgtccctgtggaggtgacgggcaagggtgggatggaggccttgccatcactatgggggtggcaggcaggtggggttggggtggggacctcactgtcatctgtgggcaggatggggcagccataaggagagcaggtagagaaagggttaaagggccaagggaagtaataatgtttctaattttcctgtgtaatttaatgaaaatgtaaattgctgggcagatgacgcgccctgccgcggtgttgaccaagatgaattgcgggtgctcgtggtcagcctgcctttgtctctgcgccctgagtgcagcgcagctcctccatctgcctgggaggcagacaccgtgccgtccaccctgatgggggccgcagtgtccgggcttctgccgagcaggaggggggcctggtcagtcagagccagcccctgctgtgaccccacacccctgtccggaggagcacaaggctgggggaggacggccaggggcctgcgttgatgggcaggttccaggtatgcggagggtcactggccagcgtggttagggaaagccctccagggggatgctgcgggtgggcttgtgcatgggaaggagcagccggtggggaggtggagaaggacctctcaggccaggggaacggtgtgtgcaaaggccccagagtggggctcactggcaggggctggggcggtcagttcagagctggacattgaggtctggtggccaggagggggctggtgggtgacagagccaggcaggacatggccagaggtgctgggcctgtcctgacagtggtgagcatccttcagaggccgtgagtgctgagtgagggtcctggctgccggtgaggatggaccccaggggcaggaggggagtccgtggccacttaggaggcagaagcagaggtggtcatggccatggctgtggggatggaggagccggtgggtctggttgcagttacagctgtggccaacaggccgggagagagggcttggggtgaccatgtggtttgggcctgcacagtggtgctgtttctagggacatgaggcaccaaggggagtcgagggtgccaggcgcggcagttgcgattgaggtcatgcaggacccctggcaggttacaagagcagtgtgcattgaatgccagagctctgggggagacctggaagcctcccaggaggtgaaaccccagggtctgtggttggagcttggaacattttggcggcaggaccagccagggttttgagaaggaggacagagcagcatttgctggtgcagcgggcatcgtggtgcgatgatcttcaggatgcagggcagtgagagccaggtgcagctcctctgagctcaggctggctgagagggtccctgtagcccagttttgtcccgaggtcccccagggcccatgtggctgcttgtcccctgctgcagatggggaggccagtcacgggcagaatgttgatctgatcccgggggacgcaggtggccgacacgtgggttgagtcttggctgagttcatccaggcttgaacagccaccctgctgtggcactgcgatggagggctggctcctgcccagtgcttcccggcctacgtacgccctgtcctcggggtcctaggctgcatggcacctgcccatccatccgctgtcaaaggcatcacgtgtccgccatgtgctgcctcaggcacaatgcaggattcggtggtcagaagacttcccggacgctggacgtcgaggtgggtgaaaccgggcctggggttgcagtccctgaggtagagctgaatttgggtgtgtgtggctttgaaacacccacgacccccagaccttggcaggaccttactttggacaccagctctgtaccacctgagtgccaaccgtggcgttgcgccagctgggccttgagactcgggaggggctggcatatccgagacccagttctgtcacttgcagtgaagggctggtccccgctgagaaggctggtgatgcatggtgggtacgctgcttcccgggaggggacttgtgctgtccctgaactcaccgagggccaggaggggtcctgaacactgccctgcctcatgagggcctgcacagagggtcttgcagaagaagggtctggctgggcctgcagaccccaactccctgcaccagcctggccccgagctcccacttcctcatgctgggcacatggggagccctgctgacccctgttctgcacctggacagccgggtgtcattggtgggcctgttgggccggggcgcctcggcctggtggagggcttcgccgagcttggtggcagggagggaaggcctctccacggggagcaggagggaggagagggacaggctggtgggtcggggaagagaagaggctggctcaggtgggctggggtcttcagctgccacacctggcagtggtgctgcgggggtggctcggccctgaagctcgtggcgggcaggagtgtgcacggacagggacccagcaacttggcgagcatgggccagacaggggcagggttctcaggtggcccccatgagtgggtgacatcaggagaccccgcatcaggcaaggttacctgtgtgcctgctgacttgtctcatgaggtttggggactttagttcaagctgaatgcctgtctccctggaggcgcagggctgtgcacaggattccccagggctgggccagcctggcggtgtccacccaggaaggctgcttggaggaggggcagagctgggctagctcgggtgggcgggcgggtgccgcaggctctcctgtggtaggagtcgggtggacagtttgcacgatctcatcctgcctgtgacaccttcctctcctcctgtttgggtcagctcctggctgcagctggtgtctggaggtccccaggcactgctgggaccccttccccaagcccaggacccctgattcatgcctctttccagagcacttgctggcctatggtcaggaagagcagacccgccagatggctgtgtgtgtgtgtaggggggggtggaaggtgggggtacagctgcccagagatgccaggagatgtcatgccgatcgcatgctttgattaaacagcctgtctggggccgagtgggcagctggtcagtgtcaggctcccagggcaggatgtatggaaaccactgggggagggaggaactggccccagagagccagtggggctggggccgcggagtggcctgaacacagtgctggcatcgctctctggcccccgcctcgccagctgcagccttggaaggccctttgcccctccaagcctcagtttccttttctgtaaggggcatggctgtcctcgccccctgggtggtggctcagagctggacatgctgtgaagtagccacctgcgtggcgtgctggtggctggggtccccaggggctgcccgtgggcggtcagctccattcggaggcctgtggtttccggctagtgtcttccttcgggcacagcaggccccagacgatgccgcatgaggactgtgtgggcctctgtgctgtgccctgtgctgtgctcacccacacggggagcctgaggcactgcccagtggggcctccctggcccagctccaccctgcccttccccacggagaagccagcctcccccgcaggagcagctccatctggggcattctcatgccttctgccgaggtgggtgggggtggggattgggccagtggctctgctttcctccccacctgtccccactgcacgaggagatgcattcgaggggctgagcggctgagcctggggccggcctggcctggatggtgcctcccctgccgccttgtcctcatctgtacccagggccaacgtcagcacctcggctgtgtgatggtgtggaggccacctgtccagcacccacaagaggccctgtgcctcagcaagggggggctgagcatccctcacctgcctaagtgtcctttcctataacatggagcaccggcctcagacttcatgggaagtgcgtgtggcctcaaggtacaaacaccgcattgtgaggaagcgctggctgcagggggctgagccctctgaatgctttgcttaggaaatcagaatgttggggcccccttctcccacacaggccaggcttggagcccgcagagtctgaagaggtggcaggtctggggctaggaggcccggcgggaaatcacaggaggccttgggcgagtgcctggccctgtgggctgcagcgtcctcctcagagaaggggcagtcgggaggtcactcgaaaggggccctatgccagcagcgggcagaggggagggcaaagtggtggtcccgggcccggcaggctggttgtgaggcaggctggtctccagtccctgcctgcattgctctgttcctccagacagtcctgaccccagcaccctaaactctgcgtcttcccatgtggggagccccaatagggcagggatccttcacctcaggaaacgcaatcccttccctggcctgtgaatatttcatcagcagattaaaaattgaagctgaacctccctgctcccccgggagggtggaggagggtgccggctccgtttcaggccggtttgagtatttttcttgataatggagctgcgtcaattagaaaatgacattgctggttaaaatgccgttctgcggccctctttaattaaggccgagatgtaataaccaatccgctgctgcgaacttgtttttaaccatcagaacgcgaggtgaatgacatggagttgggttgatcagaggcgggtgtgcggggcctcggagagatttatggaggccacgcagcagctgcggctctggcggggcgtggggtgtgccagtgtgtgttgggtcagatgggtgctctgttctgtgtgcacgtgtgcgtgcatgtggcatatgtgtgttgggaccagaagggcctgggggctgaggttgagagtcctaccaagtttgcctgcatgggtcatggtgctggagccagagggcggctcggggcagcccggggagggagcgaggctgcacaggctgcgggagtcagaggctgtcgaaggcagagtcgggctggggtgcagcaaggggagggttctgggcatgggatgaggatgacagcgcggcccaggagcccctgtgggtttgatggtgcctgatgagatgaggaaaggggcagactgactctgcgcctcctggggtgcctggaaaaccctgtggaggtgcttggagggcgaggggaggggagcagggaggtggtgtctggccatcccctcaggtgtctgaagggtgagtacgggaaggggctgcctcggggaccctggatgagtctggggcatgaggaagccggaggggccacaatccttccctgcttctgagcaggggccctgctctaggccccaggtgggcagcacaggacctggtggggctgtcctgccctccctgcctcgcccctgcccagcagtgggcagcagtggtcacccggcagtgtgcagactgtgtgggaactggcgtctgtccggaccacccagcctcctgctggccccgctttcctttggtgggactgaagatgcaccctggctgagccctgcagctcccggggtgctggcttgacacagagggtcagctgccccaaggaaacgaggtcagggcttgcctgggactatctggggcgggcagtgtgggggccagcatggggcgggctccacagctgacggctcgcatgcctgtctgggctgtgttgggtctcgcttgaggttggagcggtctccctttggggacatccagggctcttgggtctctctttggcagggaatcaggagccctggagacatgggagttctctcctgcttccttggtgtgaggaagtacgtcctcagcctgctcttctctccttggggacacttggccctgccttctggtgcccacttggaaagccagctgggggctgtgacgtttgttgacaccctcccaccacctgtgctctctgggctggcctctgggggtgcaggctggggggatgagccaccccaggtacagggtccccttctggaggggggaggaggggctggggctgctggtgtggctgggaggggcaggcccataactgggaggttctggggcttgaggaagaatcccaacttttacttttgaaacaagagcaaacagcaaattgagctctcccggctgtggaggaggtgggcttgttttcttcggtggatttcctggagtccttctcaggggtatccctggtgtgcagaggtgggatctctgatggcccatggttgtaggaggccttgggccagcatactggagagtgggaaggcaggtggtctgggaaggtggtgagtgcacatgtgtgcatgtgtgtgcacggccccatgcatgtacaccgcacgtgtatgcacattaagctggtgtcccgtcatgtggcccggccacaggcatccttcactttgagcaaaccgtcacttactttcaaaggcgtgttcattgcccagtggtgccccagcagcttccacggccccacgagtccacgagcccctgtacctccaacactgcttctccccacagctagcggggaggacgttggcagcttttctgcctcctcctgctttccccagggtggcagggcagaggtgcccttggggtgggggtgccaggccctggcaggcaggagagggaactgctgtctcctcatgctacccatgggcctggttggcctccaggcctgggatgtcccgttggggccgtgcctgttgggtgtgtacctgacttcaggctgagaatctggtgggactccagcagccgtactcatccacgagccctgctggcggtgagctcggacagcctggctgcatttggggaacgtgtccccaaggctggtggtgatgggactgtgggtggatgagagctaagggtgcctggtagctgttcactgcggatggagggggccacaagctcctggggaaagggggcagaggcaaagacggagcctagacttcactgttgccaccataaaataacacttaggtccatgcctgggaaagcctagaggtgcattccagcctttgtgtctcttctgacggatgggatggggtgcctgggtcccagcaggcaccagcagggaaggtgggttggtggattggtgatgtctgcaaggagggctgtggggcacttctgcgtgccgagtgctcccatcctggccctgcggtctctgcggctaatctaatgtctcccttctaccgggagcttagtaccgcagctgcgtgtgttttcactgtgacttctgcagaattttctgcccatactgctggctcttctgggtccccctccttggacagtgttggcgtgaggaggtggtcggtgcgtgtgtggtggtggaacgaatgaactcacccgggttggagccagccccacactgccgtggcttagtgggtctcacctgggctgcccatcaggcactattgaagatgaggagcttttaagattcctggtacccaggccacaccccagacccatcagatcggcagccgtgggggtggtgcctgggcaccagggctccctggtgattctgttgtgccccagggtgagccctgctggtggagatggcctgggccgggcattcccagggttcctcctgcagctgtgctgtgcactggccttcgctgtaagactgaaatgttcagaggccgtgttgttgctcgaagtctcagatctgggccaaacctgcctccgctgtctttggccctccaggctccccaggctgcaattgtcctcgtcctggatttgcctctccccgtcccataggcctgtgcactcccagtcccctaagagccagtggagctggcttagggatggagggactgagaagccactgggaagccgtggttgggagtcagggagcctgtcctggagttctggggtgtctggagcagaggggctctgggagactgcatgagcagggcctctggtctagaagtggtcaggaccatgatcccaggaggcatatacatcccatctcctgcagggatgcggtggctcagctccaattctgcccacgttggcttttggggttcaaggtggggctggggctgggccaccccatctctgcaggcacatctctgctggcgtttgtcctcacctgtgggaaatgcaggcccagttgtcagaagctgtgctgtgggtgccaggtgtatgagaagtacctagtgtgcctgggcccggcatgggcatctctgtgtctctttgcgctccccggccaggccaggcactgttaactgaacagcaaacagtaaaaagcagcctgacccttggacagatcccccgactccttcccagcttcagtttcctgatatgctggtctccgaaaagctgggagggtgaacagagatgaagctgacagagctcacctgcagctcagtcagcgccgggaactgctagttgttatttttggttactttttccttgcctgggcttcacttctcagggtgggttgggagggagaggcagtggctcagaattacagtggaggggtggggcagtagagtccggcagggaggggcaccactgtccacagacaggttttcaaagctgccctctgcagccaggctgaggacccagaggccggggagctgtgtgcacccccgctgggtgggggaggtcctgggcctgctcctctggagtgttcagcttggaacgcagccttgccacacgttggaggcaggtagggacctggcccgttgtgcaacctgcagctgtgcaggagaattcctcccagggccctgggctcaccctgccctggagtctgcatttttcggaaagctccgcaggtaccctctcagtgggtcagaggctttgaggaggtcagggtctgcgcccaggtgtcagacaagccctgggggagggcagctgagggggtggggggcagctccctgccctcgggatggccgctgggcccagactgccaagagtagcggcagggaggtgcttccacgacgccctcactgtgggatctggcttgggcctgtctcaggccaggcctcctttccctggtgacctggaaaagcatggactctgctggcatgtccttccctcctgcccctgccaggtggagcagggtggggcctttggggaagctgcctcaccctcacctggcttccttgccccagccctgcaagggaggggaactgtgtcaggctctcgtaggtgactctccctgggggagttctggggccttgggtaggtcacctcatcaacctcagccttgctctcctcattggtaaaaagcggggaagagtttctaccttggattttggtaagggggagccattgtttagctcccaccgggaacacacctgggatggccttgggctggggattgcatgctggccgggccggggagccaggagttgctgcctgtgctcctgcaatgcccaccagggctttcggggtatatagagcagcacggtctgcgggatggaggcccttcctgctgacacaggaggctggggaaggtccgtggctggagaaggtccgtgccttgcccagaagtgtgtcttatcaccaagagatggcccggtgcactgagcacctactgtatgctagcactgcggtggccgtcctgctcagcggctcttggattagccatccttggctgcctgcaggggaggacgagtgttctcaccgttgtcctgctatggaggggaaggtgacaagcttctctggtggcacctgtgcctcaaagtgttgggaaagggtggttttcccaggtgggggcccctgccctgccccagcctcaccctgcctgaggccctgctcagccaccaccctcgatggccctggtagaaagtgtctcccgacacctccgcaccctgcctgtctcccagcctcagcagccctggaggtggcccaaggcccatgcccatgcccagtgctgggcacccccaggaagctcagaggcccccaggcagagccggggaggcgtgaaggcatagccagggcagaagcagaacaaaagaaaagaaaaaaatccacccccaaacccacccagcccacaccctgaatctccttatctgtgtctccgcagcctgttgcaattgcctgctctgagtgggttgagaaattcgatggagcagatagttgcccaggcactgaggcgtctagggcggttggacaggtttggctcctgccccgggtggagggcccttctccagagcccggagcagaaacctggccagagttcgctgctgagcgggctgcagcctcccgcatcctcacctgggctccctgcaggttactgggaaaaggggactttcagggccaggggcaggggattgcacagagctgattcgcaccttggcccctctgctgtagccgcgtgaagtcaggcgctttgtgggcctcagatttctcgcctgtgcagggggttgggggatgtggagttggtgaggtccgtatgtctacgaggactgtccacgccacgagcacagtgggggagtcgtgggtggagggtgggagacccccagacctgagtcagcccctcagagagccttggccctgggttcgaggccaagggttcggctgtggtttgtgcagtcccaagcagaaaggcgaggtctttgctagggaatgccctgcttaaccagtcagatatgttacccagaaccttccagaacacaaacatgcaccagaggtaagcagaattggccaccctcggggcagagcacccgggaaattacgtgttcttagaaaattatgtgtaaatcacggtttcttcataagtttgtttattggtttttccctggcaaccttcacactgtctgatcctagggtgaggccatgggggcagtctacagcggaccctgtgggcaaggggaggagccacagcagaggaggaggaggaggaggagggcagcatcccgcctggggcctggggtgcccccacagaacacggggacatgggatgagaggcgtacccactgtgctccccgacatccctgctgctcgctggcccgagggctggctcctgcagcaccatctccacgggaggccgtgggccgcttccaagagggctgctgctgggtgtgccacccaggccccggccacctgccgaggacggagccaggcgtgagcccgtgcaggacagagtggaaacaccgagttctgcctgcacagtccttgggcccttgctggagggctctggctcacgagccaggagatgggcaccagtcctgttaggccgccaccatccactttcctccggcagcaggcaggcaggcaggcaggcaggagccacagctcagggccaacaggcctccctcagcctgggtagggtggagctggagggagggcttcctgggggaggtaacagggaacatatggggaacagcatatgcaaaggcccagagctgggagagttccggggcctgtaatggggaggtcagtagctgagcctgtgcagtcctcagaggccttgtgcagggtctggacttggccctgtgggtgccacccaggaactgacaaggtcttgttccagagacttccccagaggtctgggacctgctttccaggctcctgtttggatgctgttccagcccagcagcactgccctaggccctgccctcccctccccgcccctccctggtcgtctgcaggactgggcagagcccctggaccctgcctgagacaagcagtttccagggcaggcctgggccccggctggggtctcaatggggtgtgctggctttgggaacgttggcaggtctgagcctggcctatgtaagtgctgcttgctcatgtgggtggtgagggctgtgggcagagggccaggagtccccggggcctgctgctgggctcaggggaagggcaggcggagctctggggccaacagccccacgtggcaggggattttcattaagcgttgcgcccactcctaccccatgcccagttctggaaggctcaacagggtccagggagcattcatggaacagctgctgggggctgccgtgtgggagaggccgagaggaaggccagggtgtagccaggggcggaggaagcttccagacctgctgtctataaaattgaggaaggcagaggtgttcttcctgcttttggggtcccctgctcacatctgagggcacggagagtgagatataaagaacactcactccactgaatagctggggaaattgaggcagagccagggccacctgcctttggggtcctcaggcgttggctgtgagatgggtgtgctgctgccgccggcggctctgaagtgggcttcgaaagctttggaggccccggagataattatctggcaataacgagctaattaatggctgcaggtgtgccccagcccacctcccctcccttcccaggctccattctgcctcgtgcctcccacccttcctcatcctctccaccgggtgcgccctcacctcggtgtgaacatcaattccataagtcatcgcattattcctggggcactgtggctttgcctgcttggagggtgagggtgcccgcctggggagggctggaaggggctaccttgacctccggggaggggtgtgacctaccccctgcggatcagccacctgcattgttttccctccctccctccctctgctggataaatagcacacacaggctgagggcaggggaagcgtggccctggagccacgtgtggccctggcggggtggggaggtgacacgcagccccgcccctcccagcaaggatgtggcctgtctgtcctggaaggtcctgggtaggctctgggccctggtcccagcccgtttcccccaggggctttgctcccgagattgtcctgccatgctgggcagcctggtggctctgggtgggcctggcctgtgaggggatggggccctggcagcagaggcctttccttgccccacctaggaacagggaagcttctggagccgcgggggtccctgggctaggggtgtgtaggaccgggcggggaatggagcggtaaccggagggtggaggtgtggcgtgcccagtgggcccacccggcacagatgccaccatgctttcgaggccgctgaggggccccagggctttacctaaggcccccgcgattgctctgtcctgcctggggtgggccaggatccctgggcagggcctggaagctgccacctgtcctcagtagcctcggtggggggcactgggctgggtgtctgccttccctggaggctgcactgcctgagccggtgacaggctgcggactggcctgtcgggcggcagggcagagcgagcaggaagcgctggttccttctccatttccaccccgctggtcacgggagcctgccgtgcccaggcctgggcttgccgacgcctggagttctgggttcgagctctggctctgttgtggctgcaggcgaggcccatccttcccctggtcccgccgcctgcagcctccgtttccctttctgaaggactggtatcaggagacagtgtgggcagccagtgcccgccgtgccagcgccccttccggcgcacttgtgtgcaggtcgctcgcggttacctgccgcttgctggtctgcgggaggctcttttgaaagtggcgccctttggctgctcagcctggcgttgcatgggggacatggtggccacagggccttcgtgtattgggggtgaatccaggacctgggaccacagagagaggagttctggctagaatctcctggaataaagagcccccttacaattcctgggactcattggattgagggactgcccccaggcaggctgaagctggggaccccgaggcctgccagtgggtagtggagaagcctgctggggggatgctagagccctgggctccctgcaggggctctgagcccgatgcagggcgagggttccgttggccctcagaattgcgggtgactcctgtcttttcccctggcttggggttcagtaatccaggaggcctggagagcttttggtgtgctgcccacctcggagcccggatgtggcgagtgctgcctcaccccggccctgccaggcatcttatctgatgggcaggagctggcccttcgctgtcagactggactggcgcacgtgccctgccatctgactcatccaattaatgccgtgatcattttgctaattccctcagctaactgattctggaaccttttccggttgggcactgggtctcggagctgggagggaacctggagacccttttcaatgtcctcatttcactgaggggtaaactgaggcctcccaggaagcacagccctgcctgccatgcctcctcccaggccctcccctgagcccccaagccgttctgtactgagggcctgctgtgtgcccggcccctgggcatctcctgtggggaggccccttccaagggtctgccttgcctacctggtgccgaccctgtcgtttctctttgtctcccggctgggtggctgggacagggatggtggtggtgggaaggtgcgggtgacagatgaggccatgggcactgaggtgttgcgtctcctgagactaaatgcctccaacgtgcgtgattcatcagggccttccacaccgtcagtggccgtcgcccgtcatttgctggtaatgagctttttcatactgtaatttgtgtctcctaattgccgaacaagcacctaatggctctgattaacatcggagggactctgagcttccgtgtttgggagcaggcctgtggcttccaggactgcctgccacctgcctgtgtgactgggggaggcagaatgttccggaacaggggctcagggcctgagcacggtgggtctccttctggtctgacccaggtaggggtttcagtgctggtcctcagggtccccatctgtagaatggggacagcagtgtgttcatgccctggggggccagggtgtgcacatagctccggctgcgctgggtttctgatgccgccgggctccggtcctcccctcctgctgggcttggcagggctgccattggtgggaggagccccaatctgtctcccagcctggagctgccccctggcttggcactgccctctgtgcctctgtgctctccctggactgcctgctggctctgcccgccctgggccttctgtgcgggttgggaggggatgggctcagaggagtgagcggcacttgtccagggcccagtgcgtggccgctgctcatggcagcctctgcctagagccctcagtggctcccctgtgcccctggggtagctcccagcaagccttgaccctgaaccccctccctgcctggtcgcccctccttcgaagactcttgctcatcccccaagtcccatctctccctggggtggcaggggcatctcttaggcccgcctcgctgggtgcccctgcagacactctgcagcccgcgtttctccattcatgccacaaactgtgtttccagcggcttgtccaaggtttggcttccccagctcccgccagaccgtgagcttcaagggggcaggagccgagtctgcctcgtggtcacagcatggtgctggcatggcacaggccttcatgggtttcatggagtgaataaatgatggtgttccagggagcagagcctactcctgggagctgggcatgggctgggcacggggctgacggttaagtcgtggattccttcacacctacagacacacactgccgtcttagctggtgaggcccagcaaggcccccacgagtgtacccagctctgcccgccccactttctgtcggcccctcatgtggtcccggtcagctcccagctggagtgaacacttggctggtggcgcttagaggagggggcccacttggacggggatcctgcctgtgtgtgcccccatgcccgggtctgcaccagcctcactcccacagcgttgtccccagcctgatgtgcccgctgtcagcagccacctcggctccatttggagacctgagctctgggtctgggcaaatccttgctcttgttaatttggggagagtgtggacggttgcaaaacaggacccctttctcttgccccttctcccagacagaagctaggaagtgagcctagggcaccaagttcagtaagttcactttccccgggggctgttgggtgccatgttctccctgtgccatgtgccctgtgcctgttggatgccacgttctccccatggggaccttttgggagtcgtcattagtgatggaagtaacccaagtcatggccacgggcgagggggtgggggcctcgttgctctgtcctctcccagtccagcatgtggcagggccgtcgggcctcagaggtgtcccctcactcagggagcctggcggtgggccctgtccacccaccccattttcctgagcagcgggaggtgggaaggcatccgtttagggagtcagctaatttcatacctctctggtttctcatctaaagcccagccctcatgggcctggtgtggcaccacaagcccaggctcctgggtaccgtgcccctcctctgcagggcagtgtgtctgtggggcagtttgcttctgtcctgtttctgggatgggcctacactgccctccagggaggccccaaggggtgcaggtgagcagggttggcaacggcagctttgggcaggacgggcactgtgccgcacctgtgcggcaccgggtgtggctggcacggtttggctgctgtctgcctgagcactgcctgtgctggccagtgcgtctcccagtccttgggacagccttgtgggaggcccaggccgccctgagcatggggaccccagggccggaggtgcgacctgagcatggggatcccggggccggaggcgtgacgtgggtctcctcatcccgacctcagctccagacatgtcaccatctcccccgggtttggcattttttggggaaaagcctcccctaaaaactgtacagccagaaaaaagaagaagagaaagggttgtgccaagagccttgtggtgggcatactgggtccgtgccgggcttctcctctcccagttgcccctccttcagcccatgtttccatggtgggcataccgggtctgcaccaggtttctcctctcccagctgcccctccttcagcccatgtttccagactcctccacaaccgtgatgttgcccatttcttttccccccaaatctccagccgcctgaagacacttcccactcagtggggtgaggtccacagcgtcacgtgtaaggtccaggcatcagggatgaggtgcaaaagccgtgcggtgggagcttgtgctggggtgggagggaggtctggcaaacgcccactgcgtgggcaccagggcactggtggcttcagggggctccaagccctggcatattaaatggcctccaccccagcattgatgggcagctgaccctcagatgccgactccaggaagggcctagggtcggtgtctttgggaacaatgtcaacagcagcctttgtgtgggggtccggctgtcatgggctctgtgtttggatgctcccagcagccaccagagggcagcttgcatctgtgggaaactgaggcccagacaggccggggcatggttctggtggggcctcacctgcccttctggccttggcccctgcagaccctctgggccacttcctgccaggggtgtggatatggcagagcagccctgggtgctctgtggctcccagctccccacaccccctaagctgggctcttccgggcaaggctggggcggtaaccctggggtgttctgggagattggagaccccctggggttccatgctttgcccagcctgcccctgctgacgttagggctgcctgggactcagctgggtccctagtgttggtggctgggggagaggagccaggagcgtggactttggcatcccaggctggggctggcctctcggcccctagctcgtggccctggctttgaatgttacatagatgaggcctcatgtgggtccctccccttctgcttacctgccctcttacttatgaggaggctgatgctagagaggggtgtgccctgtcccggttgcccagctgggggatggggcaggcccacagcttctggggagagcgtttcccaaggtggggtctggtgctggcaggagggggcggggtgagccaatggctccggggccaccacagaggcggctgttgctggagggctgatggcacgctgggcccgggaaagcccctcgtgggccatctcccggagttctcttgagggcccctgtcttacggatgaggagatagaggttgaggatcacagccccagcctgcaggcgctcgagctgaaagccctcgcccctcgtggtggggcagcgcgtccctgggtgagtgaccaggcggccttgggtctctggtgagctcagggagcggggtccacgttgcctggcccaggtgggatttggcgggtaacgctcgtggtgtgtcctggtgtgagacccggtgttcttggctgatgtgtgggtttgctcatggggtggaccaggccgctgcccctgcctcctgtctctggctgtggccatggctgtgtggaccaggctggggctgcactggggcctgggtggtagggggtgatctgcttgtccagtggtttctgtggcttttctggggtcctgggctgtccctcagcaggcctgggactgggcggggacagtggggatgagtttcaggtctgttcttggtggctgttaactctaggccagatgtagccctgaggggcccggcagagtctcggtgggtctcggtggggccagctgtcggtgggtgaggtgccccaggggaagggagggccagcccagaaggaccctcccattaccctctggtggcttgcccatgccaccattcctactgctaggctcaggcctgtcttggggagggttcctgggctgggattggccgtcggggaggtgcacacagacgctcagcacagttgtggctgcctccagtcaggcgtccgctgagcgacccctaggagccgcctgtctttgcaggagccgcggggatcatctggcggctgcctccacccctgcctccacccctccctttttgggaggtggggcttggcatcttcagcatctctcgtgcctcagtaacaacctgggagcggtgctgtccctgggtacagatgagaagccaaggctcagaggcaccagggccccagtgggaggcggcagagcctctggtggctccgtgtggcatgttctgggctgtgtgtggggccagggagggtgtcttcagcacaggtgcccgctgggtggtctcccatgtgtgcccaggaggagtgccacagcctctccctctgcccaccccccccatgcctgccctgccagcaggtccagcaggccttggcacaggctccagaattgcacgtgatctcagacggttcccagcttcctctgcagggcggggctgctccagtctcttacaccagcgcatctgcaactcattacacagcggtgtcggtggcagagtggcctggccacggcgagctcctggcgggagtccccctccccagcagccaccccgtgccatgggcctccaggtcccccgggtgctggcctggggacagcaccacagggcccagccagggctggggcagggaggaagggcccctccactagtgggctttggcctcctcgtgaggagctgggtggggctggagaaatcagctcccgccagcctgatcttcctgcctcagaagctgaaccccggggacagtgttggtcagaaaagccatagactctccacggaaaaggaagcctggcaccccccatgtttcacgtaggccaccctaaggtccacagatgcctggggacaaggattagtgtgagcaaagacacaggagtcggggacacatcccagtcggaacgtggtggaaaggcgccaggcaggctgagtcggagatgtccctcaggctcctgctgggagaaggggctggtggttcccgggcctgcacatccccacccctgccctgcgtgccactctcagcctttgcccagcaccaggcttattatccgattggttaattggttgagatacgggtcacctcccgtaacagtcatctttttaaggcgtgcagttcagtgggttttcatccacacacttgcacagccaccaccacagccagctttagaatttcgaagcacttccaccaaccccccaaaagaagccccgtgcccgctggagctgctgcagtgccccgcctgaccccaccagccactcccctgcctgccttctttgtggatctgcctggtctggcgtttgtgatctccctccatcttcacagcagtctaggtgctgcgctgggcagggactgagtctgcggtgggggggagggtggtgaccctgtccggggagacccagccttgctccccggagcccacccttccactctctgtgggaagagaaggacactgagtctgccttgggtttctcttgcgtccccacatgcagggacgacgtgccagggcccgctgtgtgcccttaccgtggagatcccactttacagatgggaaactgaggttcagtggtcgaggagccagcacttggagacaggatgtgaaacccccggctcctggcccctcggccaagctgtcggtgcagtgcggtgaccctcgccggctggggagtgtggggtgggcttccctttgtgggggcctcaacttgcctgcctgtgcagggggtgtgtggggcaccatggtcccccaaggggcacagagcctccttagcacctgcagctccccctcgggtggggggtgccggggtgtcttgtggccccttctgggtccttggggttcctctcccacacctgagggcctgcccagcctgtctctggcagccgaaactggttcctgggccccggctcagccagcagttttgtgctgaccctgcaggaactgctaattaagctaatagttcccagagctgcctgacagcagctgatggtatcggccttgccggagatgctcggccgataagccgctccctgcctgctcagagtaatttgttattaaacaccacagctcgcgcatgctctccgctctggaggtgccagcttgcagggccaggagcctgcggcagcgggcctggggctagggtctcctcaaccccctccccccgggactccctgccatgcacctgtgtctctggagagccctctgtaggggagggaggccaggctgctccccgatggatggtcagtgcctggctgtggctcccacagtgccctgtgtccccagggctctgctgatggtcagctggccttgacaggcacagccaggtgcctgtgaggtgctgttccgtccagtgggcttgaggcccccttgggaagtagggcagctgctcactctgcccttgccacccactcccctggggctggatagcccctgccatgggggccaccgggtccttcccgcactgtggtgttcggagatgcgccctccaggatgagaggctcaggcagcagaaggctgcagagagctggctggctttgagcaaaaagtcatgtgtgccgttctgttagggtgtgtgtgtgtatgagtgtgtgtgtgtgactgtgtattttgtatgtataggtatgtgtgactgtaggtgactgtgagtgtacatgcatgtggatgtatgtgtgtggctgtgtggtgtgtgtgtgagggtgtgtgtgtgtgactgaggatgtatgtgtgagtatacgtgaatgtgtgtggatgtatgtgtgacttcatgccatgtgtggatgtgactgggtgagtgtggatgtgtgtgtgactgtgagtgtgtttgggtgtgtgcatgtgactgtgcatgtgagatgtgtgtgtgctgtgcatatgtgtgactgcatatgtgtgtgtgaaagtgtgtgagtgcaggggttatgtgtgtgagtgcaggggttatgtgtgtgtgggggttgtgtgtgtgtgtgagtgcgggggttatgtatgtgtgtgagtgcgggggttgtgtgtgtggggttatgtgtgtgtgagtgcggggcttgtgtgtgtgtgtgtggggggggttatgtgtgtgtggggggttatgtgtgtatggggggttatgtgtggggggagttgtgtgtgtggggtggttatgtgtgtgtgtgtggggttgtgtgtgagtgcaggggttgtgtgtggggttatgtgtgtgtgagtgcggggcttgtgtgtgtgtgcgtgggggggttatgtgtgtgtgtggggttatgtgtgtatggggggttatgtgtgggggggttatatgtgtgtaggggggttgtgtgtgtggggggttatgtgtgtgtgtgggggttatgtgtgtgtgagtgcaggggttgtgtgtgtggggggggttatgtgtgtgtgagtgcaggggttgtgtgtgtgtgcgggggttgtgtgtgggagtacaggggttgtgtgtgtgtgggttatatgtgtgtgagtgcaggggttatgtgtgtatgtgggggggttgtgagtgcgggggttttgtgtgtgggttgtatgtgtgagagtgcgggggttgtctgcgtgtgtgtgggggggttatgtgtgttggagatcgcagctgttgtgcctccgggggcttcttggatactgtcacccattccctgtgagctctccacacccccacctttgtgtcccctccagccccacccagggcctcctccctgtgggcatgggagtcatgggcctgggtttgaggtctgacctgctcggtggccttggcgtgttgaggcctctcgggtatcctgtctcagagctgccttggtgcaccctcccacagcctcacatttggaggcagaggtgtgggaggagaggctgagtccagaggtcccctcctcctagttcaaggctcactgtaacctgaaactttacagactccatttacacagtcccgtgtgtgcgggtgcatgagcccagcatgtgtactgtgtttgcacacgtgggagctcgccacggagtctgcctcctgcccagtgggatgagcagggtgtactcagagcctcggtgcaccgaggaaagcacagcccgtttccctttgctggactggaagtcacagtggggtactgggggctcccagacaggtgggaatgggggcccactgcctgactccctgggacccagctgggatctggtccttggtcttctgatgtcccgggtcggaaggatgactgtctgtcccatggctatggctttgaggagccccggaggccctgtggggtggtgtccatctgcatgggacgtgggggagcacacgctctgagcttgagcactggctccgccgctgctgggcagtgtgacctcgggcagggctgcgctgagcttggcagggctctctgccctcgccgtgtccactgctgggagcacgtcaggcctccctgcccggctggttccaaggcctttctggtccctgtgtgcagacgaggctcctcacctcgggaccccacattactttcttatttgtgcgctggtttactttgtctctcgccgtggggcatcacctctacaggacaaggccaagcctttgccccgtagacgaagggctcatggtgagcccctcatttgggattctgtagctctgttggggcagcctggtcatgccagggcctttcagggtttcagagtgctgcctgctatgtgacctccctggtcgtccttcctcgccacctgcaagccatccccgtgtgctggctgggccctgggctgcagactggggccagggagatctggacagcagcgtccaccccatgcagttcgctgtgtggcggcgccgggtgggccttgtgcacagcccagctcagaccacggagggtctggggttggaggtggtgtggacatgatgagtgctctcactccaggagagaacgctgccaagagaagggtggctggcccggcgggtggctgctgaggggccatcgcggaaggtgggtggtcagcagagagtacagtgtcccttcttccactgggttccacctgagggagtggcaggagccggagggcttggggaagaggccgcatcagcctcacttgagggctgagtgctgaagacagtgtggggggccctgggctggcaggtgggtcaccctcgctctgggacacgctcaagagagtgccctggagaggggtttgcatccgaagctgatcctgcttccccatcacattcccacccagttacaaaagtcatccctcccaccggcccagtgggggctgctggggcttggggctgagtggggtccttgctgcctgccttgtctgatgtgtggctttggaaaagtcccttgacccccccaggcctctgtgtcctttgccgtgaggtctcaggggaccagtcgtctagagccagggtgctcttgggcagccgccactgtctctggcccccctggtgttcattcaggcagggccagggtagccgtggctatgagcccaggtgggtatggggcttggcggggctgccgtgtgtccagcgagagccagctgggctgagcttctcctcaaatgctgatgggggccagacttctgggggcaccgtctctttccataacatgatctcccctaggcctcgcccctaacaagctggcagagaactctcgccccatttcatggccatggcactggtggcttggggcagggcctggcggccagctcttgggccggtgcctctggttcactgggcctgtggcctggcccttggggtatggaggacgggcctgggggtggcgtgcgcccccttgaagtggtccgcccttgtctctgcctgtcctgaggatgagggtcatcaactgagtcggggccacagggcagccatgggtgcgcgagtgcagggccgggcctgtctcctccgggcggcgtggcaggtggctgggccaagatggctgcagcgcttcctgggcgctgctgcgtgttgaaacccgtctgtgacgtggccagcggtgttgaaataagtgcctgtgcatttcccaacatcctgccagcctggtgcaggactgggtgccaggcccagcctgggcctcccttgtggggtgctcaggccccacttccctccctggggaggggaggagaggccacctcgagggagtgacgtcaaggcagggtgacattagtctgggcccacgggatccttgctacttccccatttatggaggggaaactgaggtgtggagaggggtgaggatgggtttgaagcccggccatccagtctcagtgccgcttgtagaggcagaagggcgtagggagggagagggagagccaggtaggccgaaggcgcctggcagtgtggcaggacacgcgcccactggggaggtggagggccgcagccagggcctcagctgagggcctcctggatgctggctttgctgttggggctggagcatggacccgtcctgggccgattatgggagatggtgtggagtgggggccgcaggcgagggtccctcttcctttggctggaggaggcctggccctgggactgtcccgtgaggggagacagtggttggacccattgcagaattgatttgttatcactgggttccaggcacacggcttagagggcatcacggaggcctccccgtcacctcagagggcatcacggaggcctccccatcatcttatggggtgggtgttattaggcttagtttagaggagacagaggatcagagaggcccactgacccgccttggggcccccagcaggcagaggaactgtgtccaggtgctggactgtgagaccctgctcttcccgggactctaccacctcagagggtggcagcacagggcccagcagggcgtgtgctcctgtggggcaggcgagtcctggctctgcccttgtaggctgtgtgaccccaggcggtagctcaggctctctggtctggactgggcgcggagctgcttgagatctggaatctggctttctggtgaaggggcagcaggagaggggctgagacccagccttcctggttgcagagctgcggtaggccagaccctcctgcctgctgggtggggcctggcattccaggaacctgtggtcaagcctggcctgggctgtggcgtctgccccgggttcgtcagcaggggaggggccctggagaccagtccgttatggatgaggaagcgggtgcccagagagggtgaggagctgggctgggccacacagccaagtggccacagagctgggggtggtcaggagccatgctttctggtaaggcggaagtgtctggggcccgggtgggatgaaggactcgggtcccagagaccagcctttggtgctgttcttgggctaggaatggcagtaacaggaagggcatggccaccgagacgcactgagttatgggcacctgccgtctgccaggaactgtggtccacgcccgactgtctttaacagctctgtgcctgctgctgtgtgccgggccctgcgctcagcccttctcgtgtgtggtctccaaccctgtgttttcccaggccgttggcccattttccagatgagaatactgcggcccagagaagcagcattgtgtgctgcggtccttggccacgaggtggtgtgggtttttttgacccagatcttcctgtctatcaccctccctgggcctaccttccttatggtagacacatgtgcaggtctgtcccatcccccagctatccacagagaggccagggtttggcatggggaggtgtcggagcctactgggttgtagctggagggaggtgagtggcacctcccacaggaagccccccttgatgtctcctccaccttgccacattaccagccgatagccaggttcctggaaaaggctgtctttctgactctggactgggtgcccctgggcagggcccacctttgttttctaatttattttaattaaaaatttaaaaattagagacagagtcttgctttgttgcccaggctagacgtgaactcctgggctcaagtgatcctcccgccccggcctctcgggtagtggggacttcaggagtgcgccacctcacctggcctcccagcctggtttttctctgcctgtttgtagccctgggttcgacgggggaagcagtcgcctgatgggcaagtgctctctgagtggtgcatgaaggtggctgtccacgtggctgtctgtggtgtcggttaatcgtcacggcttccgggagttaaaggtgagggtgccatcccctttctggggacaaggacgtttagaaccagcgaggttgagtcagatgcccaaggccctacccagccgagagcgatgcagccaggactcaaacccagatccgcaggcggcggccgctgtgccccagtggagcttgagcctgggtggtggttggcactcaccacctgtgggatggatgaggaaaggccaacctggtggtcactgccacttccgcagtgtgggctgctcccggcctgagggtggctctggtccccagctgtcctgaggggtgagggggtgaatcgcaggccaccctcctggtgtgggctgcgctggtcactggtcgctggtcacagggatcctggctctcggcccagggccactgtttcaatgggttctggcttgagggaggcccccggggcaccccccgcctccggtcttcctcccagaccaaacccccacaacctccacatgttgagccccgagcaaatgccgttccctctgtctacccagagaatggccaggccagcggctgcctggggaggcacagcaagtgggtggtaaaatttagaccttttgcctcctggcgacttccttcttcagtttcattcctacagaagaggagatagaggctcagcgagattgtctaacctatttggggaagcacagcttggcagtgcctcgtgttactgcttgggtctccttggaactcggcgcctgcctggctagttcttaaggactcctgcagctggcgccgacctggtcccgctatcctgtaggtctgtacttggcacctgctatgtgccaggcactggccagggcccagggtgtcacaatggagtggccatggctctatcctcggtagccctcagccttggcacccagggtgaggggctgactgtgccctgcactgcagggagtgctcttgagggggtgtgtaggagatgagacccctaccccaactgagagactctgggaaggcttcctggaggaggtgttatataaaacggagccaggctggagtgagccaggaaacaggtggaggagtttcaggcccagggaacagcatgttcaaggctagaggcgagagagcctgacatgttcctggaatgacccaaggctgggggtggagagcaggccgggccagagcgcgtgtcactgtggggaggtgggagctgcctgctgtcttcctggcctggttccgatggctgtggctggctgggcacccaggaaaccttcctgcctccagaattgcagtggcttttggggtctgaggggggatgctcttcatggagggcagccgagggctcccgggtgggctgtggacactgtgaacagttgctccaggcagtgggcaggggattccaggcaggtcctggcccggaataaaccctggttcatctgagggtcagcccggagactgtgtgtggatgatcggcctggcgggagagctgggagtgacgctgggttggccgtctagttttacagctgggaacacgggccagggccagcgggcagcctggggtggccagcaggtgggcccggggccggcagctctgggccctgtgtgggttgtcagggctggaggagaagcctgagggctggggtgagggcgatttggaagcagccactccctggtgcggagtaggagggctggcttctggcaggagagcattctcggtgtgagagtttgtgttagtggctgggggatgctgagattctgtaaaacactcccccaaacaaacaacaaacaccacgtgccctgcgactcgatggcagaggccacgtagagaaaacaagctgccggccgccctccctccctccctccctctctctctctgcttcccccccaccccaccccgccaggctcgcagcctgctggcctcccttctccgcatgcgggcagatcatgacaagccttgctatttattaattttttaaaacaaaaatggaattcagatttgtgtttcctatcaaagttgggatcttccttaggaaggaaggcaccctcccaccggccccgctggttggggcggaagaaggcggcccctctgcaggcgcagccaggccttcttgtggaggcccagaggggcaccctcagccgcggggcctgcccatgccagctgtcgcacctcgcagtgcccagggttgtgggggtctaggagcttcggtgcctggcagggtgcgtgtttatgcatgtgtgtgtgcctcgtgctctgatctgtgcgtgtgcctgtgtgccccatccacactgctcccgtctatgctgtctccattccttcgcgggggcagaggtccctccagtggcccaaccacagcccccactgctgccctgtcctaccgtttcttctctctcctcccctgccgcccgccacactctgctcaggcagccctgggctcatgacttgacagcctggccagctgcgtggcctcggccagggcgacctttgtgtgttggagccttgccgcgttctctgtctatagaaggtgatgcttagggagctctcagagaaccagtgagacctgtgctggctggtgcatctcgggtgctcagcgcgtgggcagtaccctccctggctgtgctcctgggggaagctgggcactgggcatggaaatgaaagcgtggtagagagggacctcctggctccttgcagctgagaccagccaggggcgcagccctagggatctggctgggcctgcaggctgcagggtctcaggagggagggaaggggcatggtgagggcaccttgggcgtcgagtctctgagggggtgcaggaagcatttccttacctgtggcgggcagtcgctgggctgacctctgggccacgtgttcactggctgagtgtgcgattgtgtgccctggccctgtgccacgcccactgtccttgacccgtcagccgggttttcctggcagccctgtgactgctggcctaggggccgaccctgtgaggggctggcactgggaatggggacctggccagtcttgctcagcctttggggacggagccccaagctcgctgcatccgtgctgggcactgacagtacccattctcaccctgtctgtgctccgctttcatttctgggggcctctggcagtgttggggttactgatctccgccagccccaggggtgttgggtccttgatggcgagctggctgccctccctgggccacatgctgtcccacatggaaggcgatggcgttgtccccatcactgcctgaccaagggcaggtggcccagagcatgggaggcctggagcatgggaggcccagagcatgggaggggtccccagtgtccagcacagttgtggggctgggccctccttagaactcagccctgcgtgtgctggcatcaccgctcgggaaggcatgcgtgtccttcctgcacagctgggtgaagtctccgtgtgtgtgtgccctgcagccagcacacccacacccccagctcccgcgacccctcggagatatccgttttcccaacttccctctccgggaccacttctgtctcttgttggcctttatgaaaacagaggtcagtttggatgtgggggtcagggaggagcactctactcttgcagagatgtaacatttttattctgacttccagctgctgcccgatttccaccgtctgtgtgtgcgttttgatctgtcataccctcgtgctctgcagaccagcttctgtccccaggaagccatctcgctgcccccctccacacccacctccatcagaaccagtatgggggacgttgcgtgagctgatggggtgctgagtggggaccctcctgctctgccccccttggaggggctgtgagaatccaggtgtgtgcggaagggccgagctggggcaggttatgtgcagctcagcgtcggccacacccaggcctggcccctgtgctgtcctcctggagtggtggccatgggggcacagtggtgccctgggtggcgagcaggtttcacgatgactgtggctggcgacgaggagctagctcggcaggaagctggcagccacccagggttctgggcagggccggggcagagggcacaggcaaggcacagagctctggaagtgccaggccaccccggctgcttcctgggagatgagtccctggctggatgctgtcatcctaggcagagaggcgagttctctgtctgctgggtcagcgctggggagccaggccggtgctggtgttgctgccttgctgccgccacctgaaggcgtgtgtgccggccagcgcctgtgtgcggggtccttaccactgtgtggtttaacccttgccacccaagagggctgtggccatctgcctccagaacgcagctggtgaacagagctggcctggtcccgaagggtcctgtggcctggaggcaaatgtggatgcttgttggtttatttgcttagaggcagggtcctgggtgccgagggaataggctgtggcccctgtcacctgtccccaaggagcagtacctggggaaggtaccgaagtggtggccctccctgcccctgccagcctcaggactgtggccattaggctgggtcggccgctcagagtcacaggaggggtgggtagggagctctgaccctgggcagcgcgtgccgtccggttgctcccaaaggcagcctggagttggggtttgccgagggaggctgcccccgcagaccccaggctgtgaagcaccccagccttgtaggggtgcctgcaggagtcccggcagcttcaggagcggcctctggagcctggagggcaggagccagaccatccttggctgtgactttgttttgtttcctcaagtcagattgtcctgcttcatcctgtgcccggaagagaggtcctgctgctgtcctcgggtgggaacacacgtctcttgccttccctccttgagggtgggggtggacctcagccgccacccatttgtcagtcagcaaatgcagctcctgctgggtcacttgcctgccagctgagctcctgggatgcagcccagcctgtggggccacccggctcctccagccttatagctcctccccaccacacctcctctgcacagcaggacccggaattatgctgttctcggttggacctgcttgtccgtgcttaactgggcctttcctgatccctgtgggctccctgagggcggggctcgggcctgccccatcagcaacagctgttgccgagggcacagatgccctgtgcatggggtggggatgaaggagggctgggggctccgtgacagacagtgggaggggaggctggctgtcctgtggtgagctgcttctggggcaccctgagatggggcctcccttcacttcctggccatccaggcatctgtgtctgtgtccgggaagtggaggagggcccccaggaccgagtcgctgcccatcactgaccgtctgtggcaggcactgccagtggccgtggcccagggtcttggtggctcggcctcatggggggcttgctccaggccttgggtgatgctcctgtgctccctgacagccgcagggtctcaccctcctgctccagcccctctctgaccccaccctgcggtcctgggaggtagcaggacagccccagtatgcggatgagaaaacctgaggcccagcctgggcgggttcgtgggtccagctcagcccctctgtgcctgtggtctgtagggacctgggcccagctgcccctaaggatggagctcagtcttccccagctccaaccctggggccttgtgtgggaggggcagtggccctgggatctggccttggcggctccagccccctctccagtatggcagagcctggaggcctgctggtctctgggtctgagactctggcctcccagcctgctcccctgggggttggtggaggcctcggggctgtcggagcttcaggattagggactgaagcccagcaggggctcccttttctgtgccccctgcctgagcacaatcttcctgccctctcccctgcagcccctctgttgtcgtggtcagtcgtgccgcctgagggccaagtgtggccttggcactgccaccgtccaccagcggcaagtcagggcaggtgcgtgtgttgggggtggccccccgcggtgtaggccggaggtggcgtgccggccccgtgagtcacgccgatcccaggatgggagtgggggtggccggggcactgtgagctggcgtgctgaggctggcctgcccgtggcttggcctgggggcaggggtagggtggggtcctgcccgggttctcctggagaacctgggtcaggagccaggggccagatcagggctggggacttcgcctggggtcggataggggctggggtggccatgagaagtgaggagcctcccatgacccagtggttgcaaggagcagatgccgcctgtcaggtgggcggccccccctgggaggaggctgcaggctgggaggtagacaggacgggcccctcggtgtgatggttggggtgtccagggactggacttgggaagggttggtgacctagtgccatggggtccctgctctctgtggctgcctctgtggccaggccttggccctcctattgctgccccacgacacctggctgtggcttgtcccagctcctgggccaggtggggagtgcagctggccaccgagcctcatgaagcacctttccagttccccggcacctgggtctggccgaggtctgaggccagaggaaaggcctcctccagaatccagggctgcccgtcctgaggtaaggggctttgagctgcaggcagacggcaccttctacccatggccggatccccccctgtcaatctgcagtagagacagcagagcccccgggaacccctcccagcagctgagggttcagggggtgcccctcactgtactggggaaatgtggccccagcgggcaggaggtgcagggcccagtcagagactgagtctgaacccggtggggcctcaggccagctctgtgacccggacaaggggttttccttctctgagccccagttgctgctgtcagagcctgcggtgggcactgatttgaggaaggacagacatgggctgggagggttgagggaggccctggagagggggaccctggggagggagatcttggagctgcagaggctttgaagaggcaggcgtatgggagtgcgtggccaggttgcccggcctgggctgggggctgggtccagggatgcagctggcctcacctgctggtagagccctgtctggaggagttgagctcagaccttagctagtgctgaccgcgctggggcagagtgctgagaggggctctctcagggccgtctctcagggctgggccctgttggatcttctaactgtctgagcgggagagggaaggcttcctggaggaggtgtccctggtaggaagacgcagagggaatgattgtgtgtgctgtaagggccaggcccagggctgagaggggctggtggagatggtgggggctgggtggggcaggacaccatggtctatgtggcgcccgcccttctccctcctccatggccacaaggcccctctggtacagagggtggtgctggccttgagggatctggccggcaggtaggcaagtgaatgacagagcccctcaggtggacttgggggtggggcctcctggttctgcctattttcttcagcggccctggttagggctttgaaggggcttcactgcaaattagccccgacctccccggggtgcccagcaggggcgcactgcaccttaggtgctccgtcgtgaagtggccacaaggtgcctttggtgtgtggggcccacaggatgagttggatgcagcctcccggtgggggctgctcaggtggtgatgaaaactgtacctgtgggcaggtgaagccaccgctccctcggtgtagcagtcagtgtgccctccccacgtctcctcctctccttctgtccctggacccaggagtttgggagaggccagcgggccagctgggcactttggtctctgtaatgaggaccctcccaccccaccaagatgcacacatgccctgccaggatgtgggggggcgcagggcagtgggctgagccaaggtgtagatgctgggaggtaaggttaccctccccctgggctggcgtctgcctccccgcctgctgctgcccctgtggccggccgcatgtggggaggaaggaagaggtttgggtggtgtgtgtgtgtgtgtgtgtgtgtgcgcttttgactgggctcggagggctctggctgggacccaagctcaggcctttagcaccttggctgggaggagtgaggcctggggagacagtgggggccaggagctgggtgctgaggagaccagagctgggggctggggcggggccagggcagctggtaggaagtcctgcccttgcagccggtcctgcgagaaagcccctggctgctgtcttggctttgctggactggcaaggtggaccagaggctggggactggacaccatgggcctctgtgcactgatggagcagtaggtgtgtgggattcatggggtgctggggtgtggattcacgagggaggggccttttgggttacgaatcagcccctccagttatccagggtggggtgctgaggcctgagtgggcagtatgagggtgggcagctaactatgtaacagccgggtctctgggaggccctggtctgtggcgttgccgtctctgagctgggaagacatgtgcctgagagctggtccggggtggcctctggctttggctggggaggccctgcccacctgagagcagcgttcggcgagtgtggactctgccccggtgctgggcgcagcacctgtcgagttcttggagcgtgccgaatgcaggcgtagcttcgggctgtctggacaggacctggttagcgagaccctggctgaagggcccagaaggggctgcagtgggactggagccacctggctatgcccctgggctgctgggatcacatgctgtgggtgattgggcagatgtggctgtgtgtgtgcacactgtggggacagacagggtgggcccatctaagccatgtcctgccagaggcttccccagtgtcagcacacacaggggggccatgaggggccgagagcccaggccgcttcaccccagagggctgagcagctggtcagctggacttgctctgggggtctttgtctcactgatgagccatgtcagggtgaggcaggatggaggtggggctgtcttgtgtggcctgagtgggtgtggcgggctgggagcctgttgcaggtcaggatgtgtccaggggccagcaccagacctgctgaggtgggaggtcagtctgtgctggctctgtgaggggccctgcagtcttggaccttgcctgtcccctctggggctgaggtcaaccctggggcaggggtaggatggggacacggaccctcattccgagtctcatgagaccgcaccacttagctgtcagtgaggcttgttgggcataaatgaagcgcattgatggggtgagggccggaagaacccacagaggcttcgcacctcccactccccgccccactctgggaaccaggccctcaggcagctggcgaggatctgggggtcacagctgaccaccagccacagctgagttggcagttagcatggtggcatggtgtgcctcttgggaataaagcttcgacctgggctgcatgaggacgggtaggtgggctgtgatcctcactccaggcagaaccgtcccatgcccttgtccataggatgagcttatccaggtgtggttccaggccctgaacccgatgtgcagggagctggaaagttcagaggagggaacaagggatcctggctaacacccaggaggccaagggaccgtctggcctgagtcttgatgaaaccaggcctcgggggttgtttgtgttgttattatgagactagcatgtgcctgtggtacagaccccagctcaacaaaagcctatcttctcctcactagagctgggagtcccagaccctccacactgtcactcaggtggggagtcctggactctccacactgtcaccctgtggggggagtcccagaccctccacactgtcacccccggggggagtcctggaccctcctcagtgtcaccccggttgggggggagtcctggaccctccatactgtcaccccggcggggagtcctcaaccctcttcagtgtcacccctcgggaggagtcctggaccctcctcgctgtcaccccagggacctccctcatcatctttgaaccccaaactgggcagacattgatggttacctgctccacatggctgggccggtggtgcagaggaaagcgaaccgtgctggggtcgccagcgactgaggatggagtcaggggatatggcagcagtggagacaccagcaagctagggacagcccgaagctgggggagacttgggaatttagtgggttctgcagagcatgggcttttgtggtgggtgagacccaggagggaagggacctgccctgggcccctcagccggtggagctgtgggtgcagggtgagcagcgtgtggacccatgcagggcgtgctggggggcaggggccagagctggaggaagaggctgcggtggggctgtactgggccgtcacccggtcggcctgggggcgagggttctctggcccttttctgtcttccaggaggaaaggagccctctgtgtcccacctgctgccttgacgctggtgccctgggcttttgtgggcagtgggtttccctgtgctcaggcggggcagtgccctcctgtggttcagggccagcctggcctccagtcctgagcaccgcctgcagaagggttttcagacgggtgtgagcatgtgggggtgccatcacaggagacttctggttcccctccagccctgtgtgacatcttggcggcctgtccccagcactggttgggcaggcaggaagctcctggcctgggatgggcacagacagggtgtgggccgtgagtcgctgctgctcagagctacccctgcgcagccttccttgaggcctggttcccgggccatggcttctgcagcctgggcagggcagcctgttgtggacagagctggttggctctcaggcctcctgggtggatggggacttaggacccccactagcatgccaggggctggcagggctgaaagctgcacgtccacacccccacactcactaccggcccggggcttgtccattggctgatgggccacaaaaggcattctgtgccttggaagaaagccctcgttgtgtggctggagggaggctgggagccatgaaggccccttcccccgcgtgcttcctcaagcctctcgaggcgggttccatccagagctgctcaggccctgcctcaccagtatccgaggctctgctccattccggcccctgccttgccaggcccggtgactccctgcttgtttcctccactcgggcctctgcgtcccccacgcccccacaggacgccccccaggatccgtaatgctggcctctctagggctccctgctcagtgtggcccttgctgggagcaggtggggatggcacggtggggatgtgagggcctgcgcgagcggtggtggcccccgaacaatgcctgggcttcttccaggccaccactccaggccaggacaaggacaggcaccctgcatccggttttccagcactcctgcatgccggctggcaccatgttggggcggctgttgccatcgccccccagcacgcagatggggaatgggcccagccaggtcacctgatttgcctacagtgggcagccagctgtggtggagctggatttgaacttggggctgcccaacgtccgggccttgcccttgtcctctgcccaggcccctgctgggtggcagaccatctgcggcaccagctgcgggtgtgacggtcgtgtctcggattgaggaaatgaggccggggtccttgtcctcttccaagaagctcttggctttggccaatggcagccgccttgtggtcacaggtgtctggttgagggtgggggaccgggcggctctgggaaaggggaactgggccgccgggccagcatgagcaccacttgcttgcgaccagctccaggctgcctggaagagactccagctctgctcaggcacctccctcaggccccttcctgcccgctcagccgccgcgctgcatcacccgaggctgtgggaccctgagcccgccggccagcggccgatggggccgcccctgtggtgggacctctcgcctgccctcgccatgaggctgcacctccttgcctctctgtcgggcggtggactggcctggcgggcgggggaccgcaggtggctggcaggtgagggccaggtttggtggccactccgtgtggcctgggtgggtgcctgtgtcttgcctatggagtgtgggactcatggcatgtctgctggggctgtgggggagaggatctggggaccccaggtcgggagaggctggggaggtatgggggccaggtctgggacaccccgctccgtggagcatgcctgtggtctggtcacggctgctccgtacgtggccgtgctgagggtgtcatgggagcgttctgattctcccaggctgccactgtcagcaacagcaaactgaggctggccctgggtctgccagaccctgcagcccgaggccaggaccactggggtctctggtgtccccccgggtgtctgggcctgagggctcctttcaggccactttgttccagaagaaagacctgggctctgggctctgggcaagggtgggagcgtgggtggttctcctccctctccttaccttgaggctctatggaggaccccttggggtctgccccactcccattttaaagatgaggaaactgaggctgggttgtggcagggacttgtgtagccggaggggtgcagtggacctgaccccgtcttcctgggcccagcgttgggacactgtgccagagagcagcagggggcttaagcggccagactgctcagcctctgcctgccctgggccgctgctgtggctgcggtgtcgggtgggtgagaggggagacataggggcagcccttctctgcagggagtgagggggctgagtcggagggtccccacacccatcctgctggtggaggccagagccggctcccggccgctccgccctgcccggccctggctcatgtcccgtttctttttcctggcaaggacgtctgttaattggcatgcacagagtgccagggcccatgtggagagtgctcaggtgccttcacagatgtccctagaaggatgcgctctcggcgcccacggtacaggaagacaggctcagtgccgtggagtaactttcccaagaccacggggagcctcggggagggactcaaaccagatcggtctggccagggtgcaagcctggaccatctcgattttccaaggccttttaaaagtcctttcgcaatttgtaaatatttagcccagccttcctcagcactgcgtgggcattgatggatgccaggcgaggctgtgccgggcagtctctgggagccacttggttttggagctgacacctgaaatagaacagtgcacctggggaccacgcagtccttgaccaggaccacctgcctcacagagccgtccatgagcgttccccgcattttgtgctgtcagtaagcagcaggcgtgcggcgtgcctgcctcgcacacttgtcccggcgccagccctgactagctggtgaccatgagcctgtcctgggcatctctgggctcagcttctccccttttccccaagcccgtgcctcgcttgggctgtctggagtgatcgtgaaggcccgttcccagcctgactctgtgagcccaaggttttttgaaagccccagcctcttgcagcaaagaactctgatttctgttttggaggtgacattggggggtttgaattcagatcccttcggcagctcttcctggagggcaggaagcgcttatagggcacttatcgctgcaccccatggtgaccacagagaggcctcttcagctcttggctttggtttactcatctgtaaagtgggcgcagaagttttccaggtcagctttcttgatgtgacaggaggtttgagtttgtattaagttacttttatgcagaaaatatcctaggctgttagactgtgcacttccgtcaggggtcctaggctgttagactgtgctcttcgtcagggttgggggatgtctttggtgttctcagctagaagcagtgtgtgtgtgagtgtgtatgtgcatttgcgtgcacaggcacacgtgttggggtcactacgggcatctggtgctgggtcaggcactctgagcgtctcctgaagcgcacttactgtctcttctgggaatgacttgggatgttgttctgctctcacgcaggagtggggcccagggtctgttgtatttttggctgctggactttgatttgtgcacctttccccatggcctcctggtgacggtcctttctcccacgattacctctgtctgactgcttgtcctctggggagtcatctgaggcatcaggttagtgttgtgtgtgaagctgagtcaaagaccctgagcaggagcctctcctgtgagtcaggcgcatggaagttttagcttgtggagttggtggccgccattctgggcgcatcgggctctcccggcccctttccctggtcttcctgcacctggatggggaggggagtcatccttcgatgtccttcctctgcctcctcctccttgtgagccaggtgacagccgggtgccctggggcagatgctgagggtctccaggtgtctggaggctgtgagttctctggagggacagagccccctccctgcttggtgggggctgctgcttgacggactgggtgtgggtcagaagccctggaagacacatttctggctcctctccttcgtgctggatgccccagagggctgagacccggtgacctgcctcctccagggtggcctcaggcctgtgtccactcacctccctgccaagctctggtcctccaaggaggggtttggtctcctgggtcctcctcggagagtcacatccgccacctggccggtcctgtcgtggacgccctcagctcgctcccgtcccctgcccctctggatggcacagactgcacgttgttgccatttcacggaacccgttttcccggatttgtcaggaggggagagaatggtggaaatgcagttttgctgggttccctgcacacgtgggcgctggctttggtcacccccggggggttgctcgtgggatccagagaagtggacgttggtgaggccaagcaggctgggaagggtgctggacagggacagcagaggcctggccccagggggttagggggccagggcttgggcgcctctgtcccgggctgggggctttggactttgggggtataatggggagccctgggacagcagagggctagccccagagggctagcggggccagggcttgggcatctctatcctaggcctggggctttggattttgggggtgtaatagggagccctgggaagttctgatggtgacagagtggacattctgccaagtgaccagtggaggggacagtggtggagagggtgtgctgagctggccttagcctggcctgggcaaggtctggacttggccatgtctggctctgcctgtacagagggggctggcagacgttcctgcgggaggcactctgtggatggggtcacccagagtctggacagagactccatagctgcagctggcctctccatccctccccttccttccgaggcccctgggggctgccggctaggctgggagttaccgtgcgtgctagctgcagccccgtctcaggttcttggggctgggcaccgaggagcagagaagctgcctgccacctgttcaccctcgcatctgcaggccagcggctcgtcccctcctgctgccacagtaccctgatatgtgccgattggtgggattgggaggggacacagcgaggccttgggtcagagccttgatgaggatgggggtggccgtcctgggggcagcaggccggagcctgcgcttgcctgcattccccggcaggatttttctctcggcctcctgggtcggcatctccttggtgcagggtggagtccgctccccaatccctgggcttaagggaaggggagggggagtctgacacacagtgggtaggggcccgggtgcccctagaagtggccaagttcagacctagcccaggccaggctaaagccagctcagcacaccctcctctccattgccgtcccttccacgggtcacttggcgggaggtccactctgtcgctgccagaagttcccagggctccccattacactcccaaagtccaaagcccccagtctgggacagtgggtggggggccaggccctacacagcaggcacggcagccaggagggaggtttctgaggctcagcctgtggggcctgtggcgcctgtggccacggggtggtttgtctcgctcagagtggtgatgagcctgacccgggccctcagcaagtttctgcggggcaggagggacgtgctgaggctgagctcggaagaggcaactctgggtgcagttgagcctctgggctggtgtcgttgagctccgccgcagccctgggagtggcagaggcagggagggcgcccatgttggggttgtgatgggggaagtcctgctcagcgggctgacgtcccgttcttggtctgtctcatgggtgaggccctgtcccccgtctgcagatgccccgccagtcaggcccctgcacatgacaggcatccggctcaggtgcgtgggtggtaagcctcttctgtgggaaggatgctgcgtgctagggtgggcctgggcttatggcacgggtgtggaggggattcttggaaagccggcaccagctggagagggtccccactgccagccttgggtgctgagcaggtgctctgtccttcaggggttccctgcctggactctgtccaccgcgtggccccggtggccatgccctgcctattctaagcaccggtgcccccatctgcaaatggtgctgctcagcgggccgtgggaagactggggatgtcccccagagaggccggccccatgccaggccccaggacatgcctgggggagcatcctctgccctgatcatttcagagtccccgactgaaccatcgtgttggcctctggcatggagctggccacgctccaccacaggtgggacctgaggaactgcaggggtgttcctgagccaggtggccgtgcacatgaaggtggagacgagagccgccctgagggtggaaagcctggccgttccacgacagagctgctggcagcggtggcagggcctctgagccaccgagagcaacatggctcaaaatgaaacaagaatcatttcttttcctgttgaagggaaactacccccaggagcccacaggctgggggccccctcgccacacaggcgggctgtggggcaggcggggtttctccaggaattcccctgcttcccactcaccctcctcgaaggtctggccctgtggtggtgctagacacagttcaggggtacggcctggaagggaggctgcgctgcccaggagcccctgcctggccctggagaggtgagcattctgccaagtccccgagctggtacccgtcctccaaggtgggcgtcattgctggaactctcagggctcatgggtgtctgctgtgtctggccaccctggtggtcgaggggtggccaaggggtggaccgaggcttcagaaagccaggcctccaggcgttgacccggcagctcttgttccgggcttggaaacatctcgcctccttgagccctggttcctcccctgcaggacgggggcaggaggagcggctcccccttgtcaccacacttctgtgagctcatgtaatgaaatgttggcctggcgtgcacctgcagttaggtgtttgagctgtggtagctgcggcctacggcagctcttctaccacatgatggagtctgtgtgtttgcagggggccgtgacagtcacctggcttggtgcagtgtgcagggcaagccccggtgtcagagcctccattttgcagagggggagggtgggaaggacgtcacatgcaggcgattggggctcccagcttcctggtggccccacgcctttggtcacgccctttccgtgactccgcttctttccacggggactctgccaggactggggcttgactcccgccctcccaccctcctagcctctgccccaggcagcagatgggtggtctgctcacgatgccccggggggaatggccgtacaggggcacaggtcagcttaccgagtgtctccggccttgtggctggaaagcagctctcaggactctccggggccccttggcatctttctaggtgggtggccctgagcccacctcctccctgtacccccatggcaggagctcctttttgggaaccagtggagcgagcgtggctggacaggcctggccccagagctgcgcgatttccatcacggctctcctctggcttcctccttggcgctggctgggccaagccctcctgacttctgggtccctgggatgggtgggtgactccgtccatgaggctacctgaattctcgcttaccctagccatctttaggctgggggatgtgggtgcttcctggtaaaatcagatgccctgtagctctcctaaaagggccagcctcagatttgcggtccctggtcctggcccctgggttcaggacttcattttggccgtgcgggttgcaccttggggatgggcgtcccttgaggtttgtgccagtcgtgggagtggaggagtagcggctgcgttgggaacccgtccctgggcaggcactctgggatggggctccgagtcccacagtcactggccggtcattgccagcccctcagccctctagggacagaccctgcctgctcgtccctgttaggggccagttctgcaggtggttacttggcttcttcttaaaaaaaaaaaacccatcctgccctgggaaacccgggaatcatggggaagcgggaaatgacagtagggaattgacatttcctgagccagcgtctggggcatcggaccaagtgcagggcgagctgggcagggaggggtgcagccggctctgccgtcagcctaaagccatgagcgacctgggcgctcttctccctgtagcactggggcacacacagggtggtgaagggggcatgacacaaccaggaggctgggtcacagaggaccaggggtctgtcaagagtttggcctgcacctcccagctgcctggcccaggtgtgcccctcctgtccacatctgcctctaagctgtgaagaatttgggagtggatgctgctctggggctgtttcctcttctgaaccatggtggttcaggcagcctggtcccaggttaagtgtgccccttagcgcctggggcatccctggacagtggccgccatgggcatctggcagccctgccagcgtggtgggtgatcatagcaacggctgcaagactcggggaaggtggtgcgtgcatatctggttgaatgtagctgggcctggtgtgaggcctgtggccgcagctcccatggtgggcttctcaggggagtaggcatgacagggtggggttcctgcaaaaaccctagccctcatgccccagttagtgagtgtcttcacctctcagctctgtcttgaatgcttcctgggtgcaggcactgactgctcatggggagccccctcctgagcaccctcttcctcctgtgtgtgcttcccacttccctcactgtggctgggctgcagctgtacctgccaccactgggtctaaccccagcgcccctgggctgtatgagtgggctgtgcaagggtggccatcagcctcggcaccacttcctattcttccttctgccgctggccagtcctcaacttgctcagtatggccaagaggacccaaaacaccatccccttgctatttatgacaaaacttgtcaacctctctgtctaggcttcagcctgccatctgcacagtggagcagggcaaggggttgctcagctggtagtgatggtgacggtggtggtggtggtgatgatgatgtaatgatggtgttgatgatgttggtgatggtggtgatcatggtggtgatgatgactgatgatgtgtgatgttaatggtgagtgatggtgatcatagtgatggtggtggtgatgacggtggtgatgatgacggtgatgttgatggcagtgacagtgcagatgtgtcattgcacgctcgctggatgccttcacagacattgctttaagctgagttttataatcaagagtggttttcctgccgaggccctttgggtgttgatggagcctgtctccatgaagggccactgcctgtgccctgggagtttgaggtcagtcaagactgaagggtgtttggttggtgtctcctgactgaggcttggagaaggtcaaggtgtgtgggtcactcttcctcattctcatgccctggcagctcgcggaggtctctgggggaggcccgggcagggtctcataggtctgggttgcagatctacccctgcctttggatcccctgcggactgagctgcctggccagctgcacttgcacgctacgtgcctcaggggccagaggcctcaggcagcacccctggtcccctcatcttgacatcacgccccctcactaccctgcgtctcccagtctccccttgtgccagcccctgatcttgcactggggaaactggacaaggtccccaccatgggggcctcttgggctgggagggcagaggtgtgagaggcaatgtcagggggccccatggagctcaaggagggagaggccagtgtttggctcctcctgggtgagcggatagggagtcaagaccctgctttctctgcatttgtgcaggggtggtgataataaaagtgggtttggcattcagagtccttgagggtctcttggtcacgtggaacctgggggaccaaactcacagaggcagaggccggacaggagtccagagcctgaccgacctggcctggctgggctctgtcctgaggctgggacaccgtgggctctcagggaagcatcagtcccctctcagtcctggcaggagcctgtctgtgctggctctgcaaccccggtcactccgaactcccacatgtccatggggctggcaggactgtggcgttgtgtctggtgcagacccagatttctgtccctcccttggcggagtcccgcctggcctcaccgtggcttcctgtgtccaccgctgcttccttctcaccctttccctcctggcccactggccggccatggggggctgatcatggaagggcccgtctcactgggcccttggggcatctctgcatgtgtcacggaaggttgggtagggcagggctagggagcaggctggtcagggctctgtgtggggccggcagtccttagggccacttcctgggggttttgtgagcagttgcgggctgcagtgaaggagatggacaccttggtgtgccaggccccatcctcctttctcctccagagtctgggtggttctggggcacccctggctcagagcaggggcctgagtgtccatgttcccgcaggtgggtgacttcataggcctggccgaggtggggggctggacctccccatggggccccttggcattgccttcagggagctccatcatccgaccctgctttggggccctcaggctcctgtggaggcaggcctgggtctctcctaactattcaggagggccaatctggcctgtcctcagatggggctgagatttagggccagggtgttggttggggaaagggcagggtaacctcagaagagctgaaattccagcctgggccacctgagctgtaagctgacacttggcctggaggccgctagcgggccatgctcctggggctggaggtgacaggcccgagtctttgcctgcccctgcggggaggcgggaaacagatgtgcagcaggtacggagagcccaccccgccgagggcccgtagggcccatcttcaacaacctctgctgttggcatgcccattttacagaaggggagactgaggctcatctaggctaaggggttgcctagggtctctccgtcagggagtggtgggtcttgtgggcccaagggtgagcagaagcccattctcaccatggccggcatctcctgggttgggcatggctgcccgccccaccctagttcctcagggcccctcaccctctggggcttgtggccacttccttcctcttcctcctacactaaccaccttcagcttcccccaaaccttgacgcgccgtggtccctgccacgtcctcatccctgtccccgccagcgctgcccttctccctcccctgggaggccaggggaagcagtacttccggaggtgggggctggaggtgggtgatccaggaagctctgagggcctgctagctgcttgcaacggggtttcagttccgggcgggggggtccccaggcaggtggcatagggttgcagggacgttgcagggaccgggagcaggcaggctcaggaccagctctcatctgggtgctggtttacccagtgggcttcctcatcgcaggccgagctcctccctcctcccgggcaccctgcctttcctttgcaccatcctggattccccaccgtggagcccacgggaccctaccccaagctcccccatttagaacgccgtccttccctccgctgggcttcctggggcgccagattggatggtccgggtgtcctctgtttttcatctagacaggtgacctgatcactcggccccagcctgtggcctgctcagaccctgccgcgattggccctgcagattccaaagggatgtggggattttgagttcccctctccaagggccggaggttccctggctgcccaggagggggctggagtcctgagggctcacccccgcccccaccacagtcagactggcatttcctgccaccttctctgcctcccccgcctgccaggcagaggccggaagggagttggtgggggttccccaggcttcctgctctggggtccagggagcagaagcatcctggcactggtgagcgttctggagggaactgtgcagctcaggaactttggtcaacagggtgtcccttccctcttccagcagaccctctggggtgtgagtgtccctggggtcctgagtggtgcctgcatacacctggggtggcaattcaccgtctcgcggagcagcctgtgccgtcactgggcagcagtcaggacaagaacattccttacttcaatgttactaaacctgccgcttagcccccgacactcaggatctgccatctgggggcccagggagctgctctgtgcctgccctgggtgctggcattccggggcattcatctctggtacaaggcttttgctcccggcctccaggtatctgcactttagagtcagttttgtgccaagggagtgatcactccaccacttcttctgtgcagtcttcctggatagaaatctagtagctgtgagaggcgccttggggctactgggcactgcccctgccgggatcagggcctgctttctgctcttccgtttagccctggaggtccctgagttcttcctgagctcctcctcgcctggggttcggagtcacactgattgcctgtggtccctaagtgggcacggtgggtgtaaggggtgtgagggtctgggattgtggggccctgtatggctcaggttctgaggttcccagatcccgccattcagttttgccactcaggcccctctgccgctcccttgtgtggggagggctgtgtgtctgctggctcccgggttgggtctgagtgtctgaggctgtccctgtggtttgggggtgaacctggagggccacggaagtcagtgaagaccagctggtaacaagtgcccctgcaagtccaaagtaggatttttttattttttattttttttttgaggcagagtttcgcttttgtcacccaggctggagtgcgatggcgcgatctctgcttactgcaacctccgcctcccaggttcaagcgattctcctgtctcagcctcccaagtagctggaattacaggcgtgcaccaccatgcccagctaatttttgtatttttggtagagatggggttttgccatgttggccaggctggtcttgaattcctgacctcaggtgatccacccacctcagcctcccaaagttgtgggattacaggtgtgagccaccctgcccggccccaaagtaggatgttttaagaataacgcctatggtagccaccacttaatcaggggtggggacggataaatgacctggaagagacagagcccacacacggggccctttgctgtgagtagaggatgtcgaggcattttttgcctcttcttttttaatgtcctcttcctggccaaaaagcatctctctctagaggattccagaaaacacacccagcctattgtcacccaggctctgggaaggtgtctgctatggacggagtctgtgtaaacaggaagggctgggagcagggcccaggggcagctggcttaaataattcagctcctgaggtgccctggaaggctgtcccagaaaccctccagtcccctcctccaactcagtgtccccctgactccccagtcttcccagattacatctggagcagggggtgggtggagaagctgaaagaatccaggagtgtcttctcccatggccttaaaattcccatcttcttcccagaggccaggaagaaaggtgggcggccttcccaggggtgcctagggcctcagatcaggccattccaaggcccggcttctgaatgcagtgctgaggtttgggctccctgcatggcccggcctcctcccaggtgctcccagggctacctggtggagatggctgcaaagccaatttgtgcacagtcatgctttcttgtcccttctgccttgaagtcagcacagtgtttccctggattggcttggataaggagggcccagccctggtccaggctcagtctgtgtggatttggggctgagcagaacttgctgctgagtacgcgtgcctgtctgcatttcacagatgaggaaactgaggcttggtaaaggaagaagctggctcaggtttcctccggcaggggtcagctgaaggtgggtgaggtggggctgtgatgaggcagccatgtggcattcccagggtccccgcagtgccctggtgggcatggttgcctggcctaggggcagctgcaggtttctgggagtgtgcctttggggcagttctcatcacacaccttctctatgcctcagtttccctgtctgtcacaggctggtggtggtagcttctccaagagttgcaggaatcagtaacatcaggttatgcaggtatttcatagactcgtgagcagcctgattttgtgtttgtctgtcttggacacactcttttgcctgctttgtcttgtcagctcctagctgttctctccctggccttctgcacctggggattctggatgtggagacctctgggctgcatgtgtttgatatctacatgtgggtcctgcctgtcctcctcccaggagttgaatgaccaatagggctggtttgcagtacctgtcttagccagtaggtgccaccaacatctggttctggaattccttaagtctgcatttttagttcaatgaaatggcttattcccaatattgtgaatgatgaaggtttccagtgggtcagacaaggctcatttgctggtggggtctgtaccccgactgcgatggggcactagtggcagccaggcccctgcagtgctggctgaatctgagcagtgctggctgaatcagggcagtgctggcttccaggcctcctttctgcaccttcctccctgggagaggaagcaagagggggtgtgtggagcaggcctgaggctgctggacaagaatgggcaaatgctcctgagcagaggtgggcacagggtggcagaacctctgtgttcctgctgcctctgagctggccttggccaggtgctgggggcagcagagctgtgtgaggtaagaagagtgctggctttggatggggtcaggagtggcccgagtttccacgctgccgagtggtggtggcatcctaaagctcatgccatgtcttcctgagatgcagggtgcacaggaggcagatgcccatgagaggcctggcccagggcttcctcccgctctagcctggcacccagcgagtgagccagtgccctggacacagctgctctgaggcttggggaggtgaagtcttcctggggctggggaggggtggagccaggggtgtcccctgacctggggcatgtgggctcagtcatagccactctatgtgttcatggtcctgctcgactccccagaagtgcctgtgattgccacaggtcaaggcacggagggcctgagagccattctgcagatgggaaggctgaggcccagagagggagagtggcttgccccgtgtgcccagcccgtcggagatagggtgggggcaggcaggcagtgcctccagctcccggcacttgctgccgtctgtgctgccttgggtgggctccgacatttcccagtggtctgctcaggcccatgggcagtggattcgccacctgggagcctcccttctgcagtgccagcctccagggtgcggggcaggggggcacctcctgaagtgtggttggggctttgaaatctctgatttcaaaggcgggagtgtgggaggtcccagcctctcctgcggccctatgggctgccctcttgttcctggcacacaccaaggccttgcacaaagccacccagcagcgtccagcccaccgcccacgtgagaggtgccccattccacccatctggtcccctcaaacagacctcagagcatggagctaggggcctgagcgtccggtgcccgggcgaccactgctgtggcacctgagcaggtccaggcagtgtggcctgctggttagggccacagacatgggagtgggtcagcaggcgccgccagtcctggcttggccacaggtggctctgagtactcagggcctggcttcccgcatctgtaaaatgggagaatcatggtgctcactgctgacctcccaaatccacgaatttacccacgctcagaactgaccaggtcctggtacacggcaggtgctcggcgacatcagcctttctgcctttcatgattattcccagaccttcaccttgagtccctgtggagatgggcagaggggctgactagtcccggccaccagccactcctcccactgctttcccaggtggacgggcctggagtgctgagggttggagcgacccaggcgggcatcctggggctcattcacagcgggttcttcctgcgtctgccgcaggcccagcctaaagccggggtcaggcgcagaacagtaccttggaggggagctctgggcacacctggcccgtagtgagtgtgaatttgcgtcagagagctgtcgagacccacggggccaccttgagggtgccggggtcttcccgcaggtgcgtgcatctgtagctggggggagcaggcatttggtggggcctggagtcacctgcactgaccactctcctgcggcttcttgtcttgcagatttctccacccaggtgaactcctccctcacctccccgacggggcgaggctccatggctgccccctcgctgcacccgtccctggggcctggcatcggctccccgggacagctgcattctcccatcagcaccctgagctcccccatcaacggcatgggcccgcctttctcggtcatcagctcccccatgggcccccactccatgtcggtgcccaccacacccaccctgggcttcagcactggcagcccccaggtgagtgcggggctggggcaaggggagggggtggggcctggggtggggctgtggcttcaactgcaggacgaccgcctcatcttgaggcctctgggaggtaggtgctgtggtctccccgcttgacgcagagtatacagagcctcggggagcagagtgccgtgggggtttgagcccaggtggggctgactgctgagcctgggcctttggatcatcagccgaggtgacttgcagctggttatctgcccacgtggccccttcccatgccggagggctcgggactccctgttcccatgactgggggactcagcagagagaggctgtggcctccctcaggcctaagcctgcttccccaaaagcttgtgcccacacagcctgggtcctcccctgaagtctctgcttacacccaggccaaagggcccccagggaaggcgtgttcgggctcagggcagctgcgtcccctctcagggatgccggccctgggacctgcagtggccaggtgtggcagcggtgctctgtggtctcggctcccccacggctctgtgggcgcctggccgtctgtggggcgtggggaccttttccacagttgaggtttgctcagtcgcttctccagctcagcctggccctttgggctgtttctggatcaggaagggctggtgcctggcagagcctggcgcagtccaggtcttgtcatggagaacttggggacctggtccgtgctccccttcttccttggagaagacaccccgagtagtgtctcttgtggagttgttcccagccctggggtgtccggtctgtgagggtggagggcgaggctgggcctcgtcccctggctcccggtggttgcttgtggatttccacctggccggccggaacctcccagactcccactaggccctccctctccaggggctcctcacatgagcaggggtgctccttccgctctgaatttctgtgtttgggtttcaccctgtgttcctagtagctgaaggctccatggcagagttttggtgccatctcaggacagcccacccgggtgggactcgccctaggagctcctctgcccacacacagctgacagcaccagatgtgtcctgtggactcccaaaccccctgctgccctgcctcagtttacctagggcaggcactaggcccaagggattgcatgtgagggggccaggaggcagcaggtggacacctagtcccaagcccccatgccatctcccgggtagtccaggactgctcctgacctaggactgggctgtagttggggtctggagccggcctgctgcccatccacctggccctgtttagagctggccttgacctcccgagctccttttccctggagaatcttgctggctttctgggccaaccccatcaaagcccctctgctttgggggatgtgtgcagaagaactggggcctctgctccgtgtccccctcatatcacctggccttccgaaagcaggcagcaggcccaaggtgctggcacgagggaggcctggtcatgttatttttagcacaccagccctgcccctgctcttgttggcagcatggtgccctgtggcgagagggcgatgaagactcggcttccgcctgtcccttggctgactggctggcacctgctgggtcccagggccccaggatgccccttgctgggtcctcccaggtctgccgcctgtcctggacacccaggggtctagtgcacagtaggttaccccctgcgggtggcagtggtgctcccagaatcctcagggatgcctggtgtcctccgcactgttgagctcttctcggggaggggatgggcagcactaggggaggaggcttttcagggctgcttctgggccattctctgttgcttcctgtgcagccaggctcctggcacaaagtagggacttgttgaagccaagttgcttgggagtgagtggtgcaggtccccttgacattggcgaggtccccggggtgggtgtgggtgaggagcagacgcgggttgccccagacgttccctgcccggccgctgttggcgtcggtctgccgttgggctgtgggtctcacccgcagttagtttgccgtggtctgaggcccatgcttgacttggccctggttccccagaacccatagctccttccctgggggttgagtccagctttgaggcctcagcagtttgtcttggaaccctggggttcctcacattcatgggagtgtgagcagggtttcaggagggatgtgcccccactcctagccccaaaaccacaaccgcaaagtcagagtcgctggagccagagagattctctgacttctgctgctgttggggagggccaggcactctgccaaatgctgccttctgccttctcaagtccatggccaggaagggccttccatgtggcggcgtccaggccactcgcccctcctggtgggggaataggagtctgggggggcttgggtagacccaggccagaccgcagctgcctggcccctgagctgtcccaaatctcttccctggtctgcaggctgtactcccagagcaggcccgggggacattccccacagtgtcccagagccttcctggctgcagccggctcacctgggcgcgttgcaggtattggtggagtgagttggtgccagcttccacacagcacttctgagtgcccggcatggagctggacttggtgtcaaggcctctgagctctagcaaagcctcctggtgggagggcctgcccagggcctgtggggctgtgatgtgtgcacagggagtgtggacgcgaggctgagcgggcttcacggggtcggaagcagggcagcacaggcgcctacccgccagggactgaggtcggaggggagtgtgcagaggagctggtttgctcctgcctcgatggacagatgaggtccagcaaggtccaggggcctgctcctggcgcagagtgggcctttcccaagtcggggctggtggagagacccttcaggggctcaggaaggaagggtgtggtgggtgtgaggagagagccaagagacgggcaggagacctgggtggggcatcgaggcggcgggaactgaaataagtgccaaggatctgaaaggggaaatgcgatggcccccaccctggccacgcgtggagtcctgaggctccagcgaagcaacaatggcagcctggctctcctgggagcgggagcagggagtgtgggaggagaccctggatagctggggggctgtggagcccactgggggagggacagaccaaggcagacccccggggcggccctgtgctgtgctccgggggctgtgagccaacccgaggcccagcagcctggggctggaagggcggaagaacgcccgcctggcctccccatcctggcacagccttgcttctgtagcctggaccgtcctccaggtgagcccaaagaagcaaggtgggtggccccagggcctgcagcctggatgggcacctcagcccgggctccactcttctcagatgtgcagaggctcaccgggccctgggctcactgggctagccagaccctctgatatcactgaggtctgggggagccagggatgcaggctaagttcagcgcgggagctggcttggccctgacactgagagggagggggaccgtctgccattctgtcctgcctggagtccctttcccggccagggctgctctggtgctccctcagtttacccagggcaggtgctaggcccaagggactgcacatggagggccgggaggcagcaggtggatccctacccacccgaggtggtttgggacagcctagaaagaggaagtgcgtgagttcctttcctttgtgcttccgagcaacctggacctgcagagtcatggcctgtgctcctccagcctctggcccaaggggctcctgctcacacgcctcggtgcctccccagtgctagggcacaaagcgagggtgcccgacacttcctgcttgtggatgcctttgctgcccctgctctgacctgatccccgccctggctgtacctacttctttccttttttcaaacaagccctttgcttccccacctctgaacactggcttgggggcccctgtgcctgggacacccctttcttcctcccaggccctggcccatctcctccaggaagcttgagtgctcactgcagccaccggcctccctgtaagacagtgagttgtctgcgagctctgctctgagccctggcacatggagcgactcagttacacttaatcagctcttagaggcactggctgggcatggtggctcaacgcctgtaatcccagcactttgggaggccgaggcgggaggattgcttgagcctaggagttggagacaagcctgggcaacatagttgagaccccaccactagaaaaaaaaaaaatagctgagtgcagtggcatggacttgtaatcccagctactcaggaggctgaagcaggaggatcaattgggcctggaagtttgaggctgcagtgactgtgattgtgccactgtcctccagcctgggcaacagagtgagaccctgtttcggaaaaaaaaaaaaaaaaaaaagagaaaagaagtaggcactaacatggttccagttttgccgacgaggaaactcaggctcacagtgattaaatcattttccgaatgtcacacgagaacgtaggaggcaggcagaatccggagccagggatccgcctctggggcctccagtgcctccaagcgagacagccactagaccagcgagccctggagggctgggcagggccttgtcccctggtgcctcccggagcccagcacggggcagggccagctgggcacttagtttggacgagctctgtccctccaggggcttcactttcgccttctgcagcgtgggggatcatgtgtgaccttggccagcccctgacctccctgagccgcagcctctgcatctgggacacccagggtttcccatgcagggagtgtcaagtgtgggtgcaaagcccaggcaccgcacccctctgcagacgtctggggctttctcttgccccttcagttccctcccttctctgagaagcgcacctgctgcctgtggacatgaacactgggcatttggtgagtcacacagtggccacccgcttctccagtgggagcttcatggcacccccactgtgctgagttgtcacgggggacctcctggcctctcgcagcccacctgagtcctgcagggaccaagcatccttgtaaagcctcacagcccacctgggcagatcgaggaagaacctagaagccagaacaagctggggctggaagactcattccaggcaccgaggtccatgtgaaaggaggctttgcggtggtttctgctttgcttgcattgagcctcaaactcttcctgtcccgtgagaaggggggatgggatttggaggcctgaggaaggaaggaggggagcttcctgcgcacaagcggcggcaggggtttgcagaagtggaggctgggggctgcctggccaagcgcttaccgccctgcgcagccaggctggctggcaggctgcagcgggaagcgcctgtgggtcctcggcgctgactgcagagctgggtggaggcagcggaaccaaaactgctgtgtcactgcacgctgcagctgttgccagggtgaccgggtgagtttcccacgcttgcccgggcggcagcgtgcgggccggcgggtggggcggaggggtgtgcagagaggccagtggtgtcgtgccacccgatgcccgggggtgtccactcccctctcctgggtcacgtgaccagggcccctgccctgcggtgttgtggggtgtatgtgtggttcttgggggggtccccagccctcctccgtcctgggaactgggcttcggcgtcctcatgtgtgggttgggaccccccagagtgcctgcctcatggagtgtccgggggcacccagcggggctgggcactgccaggggctcagtaatgagaggcagctctcatttaggtgggcagcgggcagggggttgcaagcagggaccgcccatgtgttggggggggtgttgaaggtccttttccacagaggcctggggtctgctgcgggcgagtcctgaggttgccacagcctctgctggccttgctgagcaagcacagtggccccgctgctccggagcagcgtggcgggtggggggcacggccctctctagcctcggtgtctgtgtgtgaagttgggggtacagctgcgccatccttgctgcagggccgtgggggacatagggacaaacctggtgtacaccccgctgactgctgtggttgccccccccagctcagctcacctatgaaccccgtcagcagcagcgaggacatcaagccccccctgggcctcaatggcgtcctcaaggtccccgcccacccctcaggaaacatggcttccttcaccaagcacatctgcgccatctgcggggaccgctcctcaggtaccgctgctgtgggggccaggggctggtgggacagggttgtcaggccattgcagggtctggaggcctccccaaatcaccctcctgtgggccaagcaggacccaaggccagggtgcagggaggcaggtgcctgggccatgccccactcccagggctccgcgaggccattccagggttctcacgtctgtgggacagtgagtgttgggtggggtggggcacagggcagcctgaggcttccggagaggaggtggctgctgatggcaaggtcagcatgggggcagccagtgctgcgcctcctcccttggctgggtctgggcaaggggcccgtgttgtgccactgacccccaacggcctgagagggaagaacgggctgcacagtgcagacacagagcaggtgacttgcctggggccctggtccctggtgggctgggatttgtccctgccccactcctaagctgtcctcggaggagcagagagagtgaggctggggcccagtctgagcccaggcaggggtctggagaccagcaggtccctttctgaggcctggcccgccagctggtagtggcggcgttggatggggggtgggctccctgccggggcggtgggtgctccccagccctgctctgccctgtcccgcaggcaagcactatggagtgtacagctgcgaggggtgcaagggcttcttcaagcggacggtgcgcaaggacctgacctacacctgccgcgacaacaaggactgcctgattgacaagcggcagcggaaccggtgccagtactgccgctaccagaagtgcctggccatgggcatgaagcgggaaggtaggccacggcgtcgggtgggggcgcgggcaggtgttggacaaacagtggggcccgggcttgtgcgtggacacccgagatggacaacagggagtgagtggcctggacagaagcatggcaaggccaaggcaggagtgggggcggggcccagcgcgtgggcacacgtgcggcccagagcgtgggcacacatgggtcctgggcggcatgttctggctggcgttggctgtccggtgaggggatggtcaaggagaccctcaggtggcactgcttaggttggagaggtggagcgggggcatcttctgagctgttggatgccaggggtggtcccgggccagcttcctcccgaggccaactctgtggcaccccgcagggccgccggatggcccccaggctcttggagcagttcctcctttccttttgtttttgtgctcgtcttattaacaaatctgtgtcggggcggtttgcagggaagtccctcccccgatgtcaccaaaattgtcaagtcatccagccagacctgggtcggagtcccgggccccacaggcactgtgacttcccagtcctggctggctgtagtcctcagtttccccatctgtcacatcccctttccctctcaggtttggcgattcctggcctcttagtgggtccctgggtcatggtttgcacacacgtttgggggtgtgcctcagttcctcccatcgggtcccgtgccctgggccttgtggaggtgggaggtgctgtctggggtgaagatctgttggtctgtccctgtccccccgctctgcaggacacccttcctctgtcctctgctgtgctgctcctgaggcccaacacctgtgtggctggtgtgtcttacttcctccccgccagcccctggtggggtccccaaacaggacccacaccactgtctcaccgtcagggatgtcctgagtggccaccttggtgctgcagtttcatttcatcatctctcttgtgtatgtcttctcagccttaacggtcctgttgagaaatcagagcctctgccaggcgccgtgctcctggagggtgtcctccttgggctgcgaggctgagtgtggtgtatgggctggtgtgaggtccttgtgcctgcatagcagagctgccttccagagctggtgtggccatgcccagtgctgccagtcaggcctttctgatggggattcgtgtttcatggagtgctgacgtttgctcaggcccaccctgtgctgtgcaggttgggaaaccgagggcagacggttcaagccttgcgcagggtcacatgctgggccctggcccccatccagaccttgttgctttcaccagagggcagaggagcatgtgcccagcctggagaggtgtgtgcccagcctggagaggtgtgtacccagcctggagaggtgtggacccagtctggttcttccgggtgcctggtgtgggcagggaggcttgctgtggtggcaggtgcagccttgtccctggaagatggaaactgggacaggggcaggcatagtaggcagtggccggggcccctgtgcccaggcgtggagactggcctgttctggggtggaggcccgaggcgtggctggagctggggggggaaggcctcgtgtgcagccttagcctggcagtctctgtgaggatgccacagcacagagagcttggtttagccgagaccactctcagatcctgggggcttcagggagacccctgcgagcttgggggcagatgagagcgctgtgcatggctgatgcctggcctgggcctgcagcagtaagctcgctgtcctttgaaagtgatcatcagataaccagggggggcccagggggcagccagtgcaggcttaggggaagctcaggcactgtgggagcccagaggaggcacctgaccctgcctcgggcacccggtgagacgcaggcaggcaggagggctgttgacgcctgaggaatgaaaaggtgtcggcaccacaggcctggctgcagggagcagtgtccgtgaagtctgaggctgtcatcacacctggccctcggaagtcggtgatggcctttctgagccccgtcccggaccctccaggctgcactgactccttcctaaggccctgcagcccagtcatccatgtgcctgggatcatcagactccagctgcctgggccccccaaagcctggggacgacaccccatcccatcccagtggaaccgtgcagtgttggggctggggggacctggaatcacctggtcagaccgctcccctggtgcccatcggtgactgggtcctgttaggagcagctcatgtgggggaccaccctggacacccccttcctgatccccacacatggtctcactcgccccatacctgtgagacagagaaatggggtatagagaggtgagccgtggggaggtctaagggccagcaccaggcgtggcccccatttcttgccggtccttcctgcttccagtccttcctcttggcagcgcataagccctggagaccagacttagggccgtgagagaaactgctgctgctgtcaagggacctcctcccctttgcctccagcaggattctgaggcgtgaacttgcagtcagaatgctgccgagcgctctcgccccaaacacagctgcagaactcagcctcggtgtggagggcacctctgcgtgggcggtgaggaggcagtgaggcccccgtgccaaacgtgccctgctgccagtgcctctccttgtgcacagggggagtctcttgcctcccccagcctggctgtgtgggctgcacagccaggcctgtggagctccttactcttgggcagtaacggggcccctggtgcagcccaggcactcgccctgcagggaccccacgtggaaacggtggctgggagggcttggcaggcaccctcctccccggcctgcgtctgggtgctgggcaagaccccttggctccagatgggtcctgaagtgcagagcactcccctctctcctcttgggcaaaccactgcaaggcaggctccccgacagcggagggcagggctgttggctgcatgggtgaggcattgcagcagccctggagaaagctatggggccaagttggccaacactaggtgcctgtggcccagagcatgcaggatgggagctgtcggctctggggactgagccctcctaagtgtcaggccccctggtgggcagctccgcccactggccttggtgtcaagtggtccctcggcccggtttgtgatcagacccctagaaacaggctggagctgaggcgtcgcatcccagtgcagtgctgcgagggagtcgcctggggttggtcccagggctggctgaaggcaggatggcccaggtgcccccatgcggtgactctgcccccggcaaaggcccactctggctctggggcagatgggttcccacccctatgcggtaggataccacaggctgatagcatctcaggttgggcaatggggcctgcacgcgcaggcagccaccaggagggactcgttccgcagcattcccgggaccaggggtgggcagaggtggggggacgtgcagtggtgggtgttggccctctgccaagctgagcctgggcctgtttgctgaagccggggagggggcaggggttgggggtcccgcagggacacgtgctctgatggggaagacaggcctcacccttgggggttcccagtccgatggaaaagacctagcttccacccagggtcgtcgggggagacattggtctagagggggcagtggctgtcccccattctgcttcctcctcctccctcaggaaggctgcttcccatttccttcctgcctgcctttgcttcctgtgcccaccctccagctctgaaggactgggtgtggaaacagcagggtctggcgtgtgtgcacctatgtgtgcacgtgtgtgcatgtgcgtgcactgcagggatgtggctgacccacaggtctctgctgtgggaagggagccccggctgggctcgagtgtggccctcttgccttctggcctgtgaactgggcaagtgaccttgcctcgcccagtcctcaggttcctcatctgtgatgggctgggggcatcaggaagacccctgcgagcttgggggtggatgagagtgctgtgcgtggctggtggtggggttggagagcagtggtcacgtgtgggtgtgggtgtggtatgtctgtgtggtgtatgggtgtgcgtgtggtgtgtgtgtgatatgtctgtggtgtggtatgtgtggtgtggtatgtctctgtgtgtctgtgtgtgtatgtctgcatggtttgtgtgcacgtgtgtgtgcatggttctcgtgttctgatgccttgctctaggttgaagccctggagggaaggtaagtcactccctttagagactctagcttgctgtgtggcctctggcgctgctctctgggtctctgtctccccacccttaagaggaggccagaatggtttggtggagttcggtcctgcctgtcttgggcccagccctgggctgcacaagggacggaggaaggactcagccattgccactacccaagccagaggagccagtgggcctggggatgcccctcggctccgacatgcctgcctcggagctgtctgcccttccccagaccccctccctcctgcttgaccctgaggggctgtggcaggtcggagatgtcctttgcttctgaggggctgctgcaccctgagtcctaggccagcttgtctctgggggcctgggaccccagtgatgctggggagggtccgcctgggcaggagtctcaggtcttcctgggaggactgggctgcggtgtgtgagtctcctctgcctctgagcagcctcccccgtgcctccactctgcctcctccagccgccacgctctggtctggagggtaaagaggctctgtgtttacagacacctcccgcccggcctccggcgccagcggaacatgagtcaagcatgacttcgtctagaaggtgattgtgctggcaaagcataaatcccggcccctcctgccccccagcctataaataaagcgatcatatttataatgatgctgggcagagctgccaggcccttcacagcttcaaagtgcttcacaaaacactcgctaattaattctcggctgccctggcggaggaggcaggtgccaaggagcccagctccaggcacctggggagaactggcagcaaggcccctcgctcagggccacccttgtctggggctccccatgccctggggctacctctgagcaggagaaaatccctggcaccgggccgggctggcgcgtggggtgggaggctccggtgacagctctgagcacctccaggccccccgtgtgctggcgcttcctcttggagccatcctgggggtgggcgctgtcattttcatcttacggatgagggagccgaggcacagagaggtcaggggacttggccggggccacacggctgcttgggctgtggcaggctagcaggctctgtggggctggggttgtcggatcccagggcctgcagctttaggctgctcactgtcttgagcgctcagccctgcccctttggctctcagagcctcagcttccccactgggaagacagcagtgccagctatgtcttggcactgagactttagaattctgcccttgctgcccatccttagggtctcagggacctgggccagtggaggtgccgtacccctcagctcagatgctggctgagatctgcgtgtgcgggggcttcctgccccgggggctgctcagcgtgggtggggtcggctctataggctcaggaccctgtatggagggtcgtgtcagtagtgaccccgccccggatgagcaccgccctctggagggctcatggaagtcccatgtgggggctgaccggagccttctgcagcctctgccagacccttgccatttgcccaccagccctgctccccatcctgcccccacccaccatcaggtttccagtagggccaggcctgtgcatgccgactgcggggtccctggctggctcctctgcctggttggtgtatcctgaagctggggatgggcctccccgcctgagtctccctgtgtgggcggaagtccctcgctcaagccagtgggccatgcaggaaactgttggcacagggtggctgagaggcatccacgtggggctgttacagagctgtggcggcatgaagggaatcagggcaggactggggaccctgggcccgggggtgtgaagggaggggcttgcagagccccgagacggctgctcagtgggagctgtagcttcaggagaaagtggcggctgacaccgtggcgggtaggggcagggagggtgccacaggcacagatatgttctcccaccgtttgccaaacccatctggaagccagagggtgggagggtgggatgggacatggtcagtccatgggtggctggtgcctgtgagtaccccaggtgttctgcccaccatcgagacatcctagaggggctgggatgagccccgccacaggcccagagaggtggcagcttcaggaacccctctgccaggccatacccttgggcccttaggagggcaccatcctaggcctcagaccaggaggagaaggggcctgggtcagggactacccagcccagcacactggcaggagggcacaagggagggaggaactggccccaggtccatgtctgagctcggaggagatacggtgggaagggcatttccagggcgagagtggagaggccttgactggagtaggggcgtggagctgtgctggacagaggtggccgcaggaccccatggtcgctgttgcttttctggctctgcggtttactcacttagaccagtcattttctctctcagccatagttttctcaccggtacaatggggtaatgtgagtgcccgccctgtggggcggtgttggggttgttgggtggtggatggaacagaaggaggtggtggggttggggaccagagccccagctcaggactttcagggaaggggacgtgtctcgggggaaccgcccataagccaagtggactcttctatccaaattccatctgggtcctagcctgtcccccggcacttgggatccccagataggctgacagaggggctgaggtggcttcctcagtgttcaaagtggacagtcgaggaaggcaaatccaggtggaggtaagctgggggcgggaggagcctcatgcgcctgggcagccagggctcatgcctcaggcccctttgctgagcgcccacccccagggctgatgagagtcagctgaccggagcccatgcctggtgcagatcctgctgcctgcaagcatcgctctattttgtcataatgctcggcttctggttccccccgagtggctgcttcctgggacagattgaaaggcatctcggtgccctgcatggggcatggtcggtggagctgggtgggccgtctctgtgtggccagggtggggccgggcgcctgccctccatttctggcagggcccagtgtccttgggaggggcgtggggtctgcaggtgcacggtttcctgattgcccaggtgtctctgagcctgtccctcccccgccccccgccgcaggttccccttgcccaggccctcagccagcacgggtgcccctgtgctgcctcatgagcgtgctctgctctgcttctgggcctttgcagggatcgtgtctccagcctgagccatgattcctctgcaacctcctcttccagtcacattgacacctcttccaggaaggcttcctggttctccctgagtccatagaccgtcaggacctttctcgccccatgttggggtccctgctgcactgtctccttccaggccccaggcaggctcctggtgtgaacattgattggaattaatgagagttggcctctgttctcagagcacacaaccacacggaggccaggcctggggcagagatggggtctccatcacccagtgctggtggggatgctggtgttgtgggtgagttggctgggagctggcaccacccggccaggacagccttccctgggagccactggccgggctgagcgtggggctcacctgcgcctcccgggttgtagccgtgcaggaggagcggcagcgtggcaaggaccggaacgagaatgaggtggagtcgaccagcagcgccaacgaggacatgccggtggagaggatcctggaggctgagctggccgtggagcccaagaccgagacctacgtggaggcaaacatggggctgaaccccagctcggtgagttgcagcctgtgcaggggtgggcagcctcacatgcctcagtttccctcactcactcaccctcccacctgagcagctgatgagccagagaggtcctgggggctgccctgggccctgtggctgcctcagctcggcctcttacctgaggtgaccccgtgggcccctcgccccagctgggcggcactctcctctcctggcccatgcacgagtagcccatggggcaggggccaggggccaggggcccggggcctggggccctgcggccacatcatcatcctcggccacctctgctggggcctcagccgccgtgtcccctcggagtttggcctgtctcggtgcagaggctgtccctgctccccggtgccacttggaaaaggtatgggaggaggccgagcccccagcaagaggctctgcaggttggttccagggctggctctgccagcagccgtgtggccctgggcaggtgcccggcagtcgcggtggctgctgttgatacaggaagcagctctgcagccccccagctggtcacccccatgctgaccctcctgccccctcccaccccaacagcctcaaggggaggaggattgggtgggccgcagccctggtcccgggctcttctcctgggctggctccagctggtcctggaggtgttggattcaagaccccctggcctcgccctcctctccttggaccctccctgttactggctcgctccctgtggcatctttgcttctggctgtggccttgccagggagggcagcacaggggcgttctgagcccctcctaccctaccctaaggcctaggaacctgtgctgctcgggaaccattgctccctggtgagcttgtctggctgggagaccccacctgtcccaggccccactgagggggtggctccagctgtgcccggggttgggcaggtgagctcctggccacccgtgtgaaggttcaggactgtgcagtaagcttcctgctgctggggacctgggtccagctggccctcagggcccatgtgtcttttgccatggtcaccatggtgtccagtcttcatctgtgtctccgtgtgggtttggggctgggaccagagccctgtggccaccgaagaccttatacaggccgaccatgaggttgccccaacctctgtccctctgtgggcccaggcacaccagcctgccctccgtgctgggtgcgccctgcaggtcactgtctccccaccccccagggccttcgtgcttgcagctcacgtggcctggaactgggccctctggctcttccccaggctttggtctcagctgaggtacctccggccttcatctgtgcccctgccagggtggggactgcccctgtgatgtgggctgagagcacctgatcttttctctgtggcccctggcactggccaccacagggtgaggtgtgttcacagggtaaggtgtgtggtgggttaatttctgcccccacgaggctgctggtgatggctgtgctgctcctcaccaccagcttcggtcaaggacagcgaccccaccctgctcgttggcactcacacaaggccggcatccccactgcctctgcctgtctgagggtgggggtctgctcttgtctgaggccccgtggctgggtcagggccaccctgcttccctgccctttctggataggacaacctggtgcccccacgtccccggctctgctcagacctctactctggctgggggctggggctgcccagcttgggggaagatgaatgggaccccgacagcaggcaccgttctttccggagaaaccctccccttgagtgacaggcacagacccacccccagccctggctggtctgcacgcatgccctgccctgctcccgcctcaccagcctcgcggagggcaggggagggagggtggctgtgagggtttcatgatccagcagaaaatccaaaagcaagtttggcagatgcacaaagggctgccaagtttttatttcgtgaaggacattatttgggggggaatctgccatctgctgtctccgccactgcctgaaagttcagggagtttagaaccacagaggcaggcagggctcgctggggataaaggacacgtcttccacggggagggggtctctctgtgcccgctcactccctgctctgtctcatctcacactgaacgctcctctgtggactggcctgggtccaacttccagaaccgctcactgggccccttctctcagatgggcaaactgaggtccagagagggggcgacctgcccagcgtcacggtcctggtgcctggtttctccccagcgcggggcagggcctgggcgggtcctgtggacacttctaggcaggagtagagcccatcacacgcctactgttacatgaggcacgttggatctccaggcgagaatgggaggctcacagaggttaatcctttccccaggccacacagggaggtggagccaggatcctgcactatccctccctacctaggggaccccctccaggcctagccctgctggtactggagcgagagcctcacacctgccgggagtgtgcctcctcctccgctccggcctcctggctctccagcctgccacattctgctccctgtggccggctgtgcacactgcaggcacatgacagatggtgacccgtgtgcccactcctgcagaggtcccagccagcccaggagggcttgaggctctccttcctacccatggcaccagcctgtcacctgggcctgctctgggccccgtcttggcttccgagagtggccggctagtggctgggaagttcctgggtacaaggatccccagcagagccactgctgcagacacggtgctcggggctggttcccatatccccccgcccctgccaggcctgcttcatcctttctcagggataccctgcagccgatgggcaggcgagaaggatgggcccctttcagcccccagcgtgacagaaggagaggctgaggctaagaagccagcctggctgtggcaggcctggggggcgctgtgcacagatccgggagccctgtgagtgctgggggctgtggctgctgctgatggaaggtttgtggaggaatgagtgagtctgtgtagactgtggtcaaccccactcagccgagggatcccacccctgtgtataccccttctggctcgggcccccaagggctgccctgccctcttccgagggtcctggcgagtctctgtgccattcctcgggggccttctcactccgccctcagaggcctttcccgccgggcgctgcgtttaggctgcacgtctctgatgagcagatggttgctgttggtggaagctcttcaaagggaggcatttttctccttggcagatgccctgaagtgagggatccccgaatcctattcacagtcgttattcctgcagcggcaccactgagggggccgtcatctgagttcccattgctcaggacacagaaggtccgtgacccaagccccacctgccaggagctgaggaggggcctcccctcctgccctgttcaaggctgcctgggtcccctcatctgtgagactgaatggcccccttccggctaggactttccaaaggagccgtgaatgctgctctctctgtgcctggggcctggtatctcagccgaggctcctgccctcctgagctcccacatccatgcctgatggaacgtgagaggccagccctgtccccagcgtgggccaccttggccatcagagatgaaggtggttggtcccaccctgctccagtgctgcccatatccagtttcgtcagctcgccgcacctgccttccagagctgtgggagagactcgtgcgtcctgctgtaacccagtggctggaaacaacacacattttattatatgactgttctgtggccagagagccaaaagcagtcttgccgggctgacatcaaggtgcctgccggctggctcctggaggctctgctggggagtctgccctggcctctgcttctggcacattccttggcttgtggcctcttcctccaccttcaaacccagcagtgtctctctccccttgggccccagcgtctgtgatctcatctcttcctctgaccctcctgcctccctctcatagaccccttgcaatgaccctgggtccccccagtggtgcaggcttacctcccaatatcaggccacacctaatcacctctgccaagccccatgtgccatgcaaggtcgcatagtcccaggttctggggattggggcctgggcatctttgggggccgtattcagcgtcctgcatgggcccagcgtgtggcagggcctggtctgggctgtgtttggtcagtacactggcttctgggactgaatgtcctgctcttcttcctccactgcagccgaacgaccctgtcaccaacatttgccaagcagccgacaaacagcttttcaccctggtggagtgggccaagcggatcccacacttctcagagctgcccctggacgaccaggtcatcctgctgcgggcaggtgagtggcgaggcctaggtggggatggggatgccatgcagatgggacacgtaccaggacactcccccctcccgggatactccgcactcccgggacactcccctgtcctgggacactcccccctcccaggacccactcctacctcccgggacactcccctctcctgggacacactcctacctcccgggacactcccccttcccggaacacactcccccctccctggatgctcccatctcccaggacgctcccctctcccaggacgctcccctctcccaggacactcccgactcctgggacacacttctacctcccgggacactccccactcctgggacacacttccccctcctgggacacacttccccctcctgggacacacttccccctccagggacacacttccccctcctgggacatactccccactcctgggatgctcccatctcccaggacgctccccgctcccaggacacactcctacttcctgggacgctcccctttcccgggacactccccactcctgggacactaccccctcccgggacacactccccgctaccgggacactcccccctcccgggacactcccccgtcccgtgacattccactctccctggacgctcccctctccctagacactccctactcccgggacacactccctgctaccgggacactcccccctcccaggacactcccctctcccgggacactccccccttccgggacactcccccctcctgggacagtccccactcccgggacactcccctctcccgggacactccccgctcccaggacgctccccactcccgggacactcccctctccccggacactccccactccccggacactccccactcccgggacactcccccgtcctgggacctcctatgtactctatgggactgttgggggaagggcctggggcctcagtttccctccatccctcataaggaggtgtaccatgcggggtctctcagtggccttcagagaggtaatgggctgtcggtggaggtttgggggctctggagagggaggctggctgtgttccaggggctgcccaggagagccacgtgctctctgcccttctcctcccactccaaggccgcagctctctttccatgcggtaatggtggtgcacagagccactgcacagaaatgcctgctccacgcgcatcacactccccgtgatgccatgcggcggccaggacggtggctgggagctcagctttggggttttggggtcaggttggcagtggaagcctggatggggcaggccccccgcaaagctggtcccccacctggaaagggggtgtgaggggcgtgctgactggggctggttcttgccgagtcagccggggtagctgtgaggccaggctgttagtggagtttcctgctggtgaagcaacacgttgggtgcccaggtctgccctcactgcccgacgatggtgctggtcactgtcccatgtccccctgggcccaagaagccaagctcccttagggccgggtgtcccagctgcctagaggcccgctaccgcactgtgggctccgccgcctcagcccgactggggagcctcagcccatacaaggcggctcctaagtggcaagtggagaagacacagccagagacgggctccctgtgaagcagggaatgttctggaagttgcttgggtcagggctgtgaccacacaggctgtgtgtatagggcctggcgccgtcgccaccctcctggaaggactcttctggccatactgggccccgccggaggagccaggataatctcccatctcaaagtccttgacttaatcccgctggcctcgtgtctggtgggtccttgcccctctgggcctgaggcatgtggctgtctgccgttgcgggctcagacttctttcagggtatggtgagtattccgcctgccaagggaaccctgcccttgtttgcaggggctcccccagaaccctcggttcagagcccctggctttgccagctgcaggcctgcctgaccccagtggtccttggagagatagccaaggcttttgctgagagagggcggtgctcccaccccaccccaacccaccagaccgatccagagaacagctggccgcacgcagctcttttcctggggatcccagatggttgtgcgctgggggcctggcggaggtccgagtcgggttggatggctgtgtccgtcgccatgtttgtgtggtgcctggccctgtggtcccatgttctggcagcttctggctccagcctcagcctgtgtggggtgttcgtggtggagtgcggtgctgagggcctgcgtggggtggtcgtggtggagtgcagtgctgaggttagagggtttctgtggctgtccctcttaggtgggcacctgcctgtggtctccctgcagctgtcaggtgggggctccccgcaaggcccttcccttagcccagagccctggtgccatgagtccccaggcccttctaggatgcctggaaagccatcccgtggcatctctgcgagggtggcctctgctcctgcccagcggctctttccgggagatctctgcggctgcatgtctctgagtgggactcccagcctgacctccccctgggcgcccactgaggtccttgctgacctgtctccagtgggccctgctcatgcatgcttctggcttcgagggccgcatggtgaggtctgaagctgcatttccggcatgagtcccagccccactacccacgagcagctgaccttggctgagtcacttactctctgtgcctcagtgtccttgtgtgttctgtctgccggggccagcagctcacccatcaggtggtctccccaagccccagtaaggtccactgaagcacacgtccaattcagatgtggaacactggagtttgaagcctgcactggccaggtggctggagaggacctgggttaactccaaggatacactgtgcctggctggtgttggctgaaggactctgtccccctccagggggctcaggtcaggatccatggctgtagcctgactggggaccaggggtgatcctgctgggttttcttctggcaggaggcagtggcagaggtgaggccccgcccagctccggcaggtgccagggccactgagtgctcccccattatgtccctgtgctaggccctcccactgtgttcccagtgctggtgggggaggtcacttccgctgggcgacagcaacgatgggaatgggtgcccagacctgcaattcccaccatcgtgagagccattggccatgcaggttcaaggcccaaggtctctgctcactccggggagtgtccacctgtggctcgcggtgacactgagtgggggtgcagtggccacagccctgcaggggcccagaaactggtggaggattccagccaggctgtgggaggttgatgtcacacgtgtctgctcctgtggggtagggccccttccttggggtgggctgctgccctacccgtccaggaggccttcagaaataaagcattaaaatgaagagttttggcttgttccatggaagctctgggtcacaccctgacccttgtgtttgtcagatgagtaaactgagacagggccgggtcgctcacagctttcaggtttctccgtccaacctccttcccacctgcccccttcatcccaggctgttgctttccaaggccgtgttagctgctccagcggggtcgtctgagggcctgggttgcacaggcacctcctgcgtggcggcagggtggggggtgggggggggtgaggggggtggggggaatggaagtgggcgggccttgctgggctgggagggagggagggaggggccaggcttaggtagcaggcccaaggtccccctgtggggacagcacaccactttactcccctggtcttgttaatcctgcccacatctctggccccagaacacagggtaagccaggctgggctcttgtcactgccgccctgggacgggatccccatcacaagccccatggggacagcagccgtgactctgggggggccctgccctgccttgtgagtgtggactcatttaactctccagaccaccaggagtcggtgttattactgtcccttgtgctgcggaagtggtggctcagaggtgagacaggaacgtggctgagccaggttggagcccgaggccccagcttccccacctgacccttgactctgtgctgttccttccggaagcgctgtccaggggtcctgcaaccccagcagaggccctgagcgtttgggcagggccacgagggatctgcaggagtaagttccttgggaagggccagcctcttgagttggaggacatagtgaccaagggagcagccccaggcaagactctttgtcctgcgcttggagcctggagtaagacctggtatcctctgcatcactgaggtcctccttctgaaaggccagcgcaccctgagccgtttaaagctgtgtccgtgccgggcccccacatcacagggccaggagccctccttcctgcagcgatggagcacttaggaaggtgaagacaccccaaaggttactgtaaagtgggttcctctcctatttttctcttacatccgagaaggaggagggcagcttacaaaggtgtgtggggcaggagaggagaaataaccgagtgaggacatcggggtggagggacaggggacaggggagctgagatgcagccggcgtgccggagggtgcagagagagactccgcactgttctgtccgtgtgtctgggctcctgacctgtatcccgtgctgagggccgcacctcggctcagcagcgccttctgaccccagccgtgcactaggcccctctgctgggcacaccagagtttcagaggcgagtctaccctggtgcctgctgggtggcctcaggggctctcggggcagtgggaggggaggtggccactgctcaggtaaacccccaggcctgcaggatgtgagggagagaggcaggcccgagaggccaggactggccagggatggtgggtttggggccagttgtgccccagcccagatcttgtcctcggccccctgggtccctgcccttggccacaggaagtctgtccacactgggcctggtgtgggaagggagggagagccctttcctaggagagcatttgctctcactggatgtcagacccagtgcctctcagcctgggaaaacctgacgggctgagccgtaggaggggcaggagtgggagtgggcccggggctcctgtccaagtctctgtgtgatttggggcaaacccttcccctccctgggccacagattacccacatgtcagattgagggggcctcttctagattagacttctcccaaatgtgatgctacagatgtttcattgggcaaaaacaaaaaaaaaaaaaagagggttctgtggtcaaagaaaatctggctgggcagtgtggaagctgttttcgcggctggctcggctgagccctgggatgccactgcatgctgcggccttggttgtgtttcctaaacccccgccccgggggaccccactcttcttactccccatcgcaacgggctgcctgctgccacctggcagggagaggggatgcatgacaggcggggaggtgccagtcccgagtctgtgacggtatttccagccctggcttttccatcagaccgcccgtggtgccgtctgcatgctcccacggtgatggggcacagaccccaccgttcctccctcattttggttgcacagcctggggccagttgggtgccatccctgcctggtctgtcagcacacctgggcggggcggcctcgggggtgggaactccctcctggggccctgggattactcagttgtgaaatggggagaatggggacggtgacacctgcccccgggttccccatgacagggtgggtatgtgctgggagggtgtggagggccgagccggagctggcacggtggtccccaccaacttcttgctgatcacttaccccctcatgcctcagtttccccctctgtaaaacaaagttaatgccagttttccaggattacagttgggattaagtgggaaattaatgacagtgtcggccatagaggctggagcctctagagcgctcagggagtgtggaaggtgctgaaggtgactgtgtgactgcaggtgactccatgtcaccctgtctataagagctgttaaaacagcagtgcgtgtgtgcgcgagggtccctgactgtgtgactgcaggtgattccacgtcacccggtctccaggagcccttaaaacagcagtgcgtgtgcacgcgagggtccctgtttcttcctccccgatgcctgctctgcttcatctgcactggaacctcatgttgaggggctgctgttacctaactgtctgccccccagggaacccccactatgttgagaggctgctgttacctaaccacccgccccagggaacccccactgtgttgaggggctgctgttacctaaccacctgacccccagggaacccccactatgttgaggggctgctgttacctaactgtcccccagggaaccccctgatgttgaggggctgctgttacctaactgtctgccccccagggaacccccactatgttgagaggctgctgttacctaaccacccgccccagggaacccccactatgttgaggggctgctgttacctaaccacccaccccccagggaaccccccgatgttgaggggctgctgttacctaaccacccgccccagggaacccccactatgttgaggggctgctgttacctaaccacccgccccagggaacccccactatgttgaggggctgctgttacctaaccttcccccctgggaatccccccgaaagaggctgcggctctcacgcacctgccttcagttggataacctgctgtttggtggcattccacgaagggcacacagatccccgagagtcctgggaccctgctggcagcagtggttctggggccatcctgggaacatccctgggtgctctcccacgtgctccgtggcaggagtgtcctgcacacgcgggaggaagcttctggggcacatgagtttgtgagctcccgggttccacaaagctcaagggactttgtgtgggacttctcagggcctttcgtgtgccggtgtgtactgtagaacgggcattctcaggaacctcttttctgtggaacacttcatgggattggggttccagagcctgtcaggatgggtcggtgacatgctgcctctgtagggtcccaccaggggctggggaaggggcgagccccgtggggcctggagacagctgagtgactgtgtgcctcctccccaggctggaatgagctgctcatcgcctccttctcccaccgctccatcgccgtgaaggacgggatcctcctggccaccgggctgcacgtccaccggaacagcgcccacagcgcaggggtgggcgccatctttgacaggtgggggtggtcccgggaggggcgagggcgcttcggtcacctccgccaccaggccagctgagttcagccaccttggccccggtgcacatcctgcctagtattatttcagtgcatgaagggtgcacacatggaaaaagagaaaagcatgaggaggaggctcagagccctgtgccagccctgcctctggggcatctgtaaccacagggagcacttggcctatctccctccatctcttcttttttcacgatcccatgtatttatccgtgggaaggaaagcttcgtttctttttaaagtgattataccgtagatgcagttttgtaaaagtgtcaattccagttggcatgtcgcaggctgcttgaggctggcacggtaatgccgtggcagcccggggcgtggtgcggcctaacgcctgtccccgtgcaggcaggggtgtcgggaccgcagtgcttcacacctcccagtggagcaaagggctgcacctcagccacttctcaggggacacactggaggagcagcactggctggagggcccaccctcgtccgggcctgggtggtccgtgtccgttcatgttgccctcctggagtgctggccaactccgctctgccaggcgaggcggacagtagcttccttgtccctgtctctgcacagcctttttttttttgagatggagtctcgctctgtcgcccaggctagattgcagtggtgcaatcttggctcactgcaagctccgcctcccgggttcacaccattctcctgcctcagcctcccgagtagctggaactacaggcgcccgccaccacgcccggctattttttttgtatttttagtagagacggggtttcaccgtgttagccaggatggtctcgatctcctgacctcgtgatccgcccacctcggcctcccaaagtgctgggattacaggcgtgagccgccgcgcccggcctctctgcacagtctttctccacgagtctagagagccacacacaccagactgggccttctggggaccggatgtcagcttcagctggagcgggaaggctggggaggggcactgcggggtcccttgggcaggggtctgcaacacaggagccgtgggtggggaggagcaggccacctggagaacgtggcccctgaacacgagagccccaacgttagaggtgagtagaggccatgcaccggcacttacagggggattaatgccccagcagcaatgccccagggggtggttcaggtcccagagtcccaagggtgatcctggaacttgacctccatgggatgtgccaagtgcaaaagggtttgtggccgcagacggtgggcaaacggtagttcaaacagtgtccttgagggtctttgccgcaggacttgtcagggcctttaagaagttagtgtacaggagggtccccacgggggctgcagggtgcagtgtgcagtgtgtattgcccacagaagcttctttagaggggtactggggatatggctttgggaagcgaagccccagccacttgcccagctgacagatcctttgtctggctggtagagagatggcgatgacagaggtttcagggttacattctctggggtcccacagcagtgactacagaggccccggcatttcctcgccttttttgcgagtggaatgcaaagtctgccctcagtggcccaggtcttttccatgcccgctgccccatccctctgcagctgtgtgctcctgcctcagagcagacatcgggggtccctcccagctcctgttctgtcccaccctgttctccagcctccttcagatcttcttccaggaatcaaccagggcactccccattctgcagaccctcagggccgcccttggcccacaggggagagcccaggctccttaggcaaccatccccacctggtcacctcctttcccccgctgtggcccacccttacttcctggacacagcagttgagctttggggttggtgggcaggctgctgaggctagggggcccagtacactgcagaggctggtgtgattcagaatccagctgcagggctggggcagctgagtctgaatccaagaacgcccccagcgtctccatggagggagctggcgggctttccccgtgttgaggctggtggattttttttctctggtgacaagaagtagacatgcctccctctggcagcccccacccagggacaccaggccctggggaaaggtatcttcctggactgaagggagcggctggggctgtggcatgggaaggggctttgcctcaggtggtgctgggtccacagctgaggagggacagtggtgtgtctcactgggttcgggaggggtggactctgtgccctctgtgcagctgcggctcacctcagtttagctgtcacgaggcccctccttagcacctcggttcccagaataaagccccgcaggcagaccctagagggagaggagaggagcccaccctccgggcagggccaggcaggcctggcaggggcggcacctgggcctgggttccagcccactccctctcggggtgtctgggagtccttgccttggcttggcccatctcagcggccctcgggccacgccgggctctccagaggccttgggtatctggggtgtggccctggtgagggctgcgacctaactgggatggggtgtctgccctcctcctctgcagggtgctgacggagcttgtgtccaagatgcgggacatgcagatggacaagacggagctgggctgcctgcgcgccatcgtcctctttaaccctggtatggccttcctgccttgaggcttctggccccgttctctggtggggcagaggtgcctgggcctcctcctggctgtacttcttgcctctggctacatgtggggccaactcccaccctccttgagctcagtgtgcccccctcccagtgaaagtgtggccatgctgccttctgctcaccttgagggccagccaagggggcatggtccctgggcacagggggacccagcaaggcagttgtcatgaggggcttggtggtgccgtctgggctccgcggttcatagtgttcatcactgtgcgtcggaatccagactccgaaagtggccagctgtggttgtgaacttccggtgctgaagttcaggagtcccaagccctgcaggctggggatgggtcaggcctgccgggtgttccagaggggaccaacctcatccccaagcctcgggtccagggtgtttctggggctgggcccctgtggttgaggagagcagggcttggggctgtggggctggggctgggcacaggcctcctggccgacagtgcggcccttctccagcctctgggttctcggcttgaaaagcctcctaggtgctactccttcgcccaacaagtgctgacacgtgcctgtttgctcggtgccctgctggcatgggagggccccttcaagctgctggatagggcttgcctgcctagagcttggggtttagagggtcacgcccaccagcaggcacccccggcacgtgagggcaggagcacggttggtcgagggtgcgggccacttcctccgggagctgcaagttaggggccaggggagtgagaggcacggaggtggggtgggctggtggaggcagcccaggcagggccttgaaagtcttgctaagtttgggttttttcttggggccacagggagccaagtcctgaggggttccagccgggagggagctatgggtttctgtgtttggaaactcagctcattgcgtgataggggcaggtggctggggtgtggagggagaggtttggggctgctgtggggagctcacttgggctatggtggagggagtggagccctctcggctcctggccctgaccttctgaccttgccctttgtcagacctggctctgagggaccgggccgggatggagatgggcatcttcttgtggggagagcttgtttccagggtcattttatcacccaggctgtgcatccgggccgtaatcctgccagctcggaggctgagtcatgccacggcccggcccggcccgaggaatccccattcaggtcctgtgtggtctggttgctagagctggggcaccagcaggacctgggcaccggcttgcagggagggtgagattgtctggcacaagcagggtccaggcacaggcttgcagggaaagcgaagagaccagggcacaggcatgcagggagggcgaggagactggctggagcggaggcagctgggggagccaggtacgttgccaaggagcccaggacacaggccaaggtggcattcacagggggtccctgggccttgggggccaaggtggcattcacagggggtccctgggccttggaggttttggtggctgcaatcttagcctctctgtccactctaggctcttgagcccgggtcctgagctcaggactccgcaagcacaccgaggatgggtttccgcagggtctgggtactcctgggggcagcagcgctatctcccatccatgttatggggctgggacccaagggcagcagcagcatccattgtctctcccagttcccaaggcggctggaaggaaggcagcagatccctgacactttatcgatggggaaaccgagtctctggaggtcaaatagttgacccaaggtcacgtggctggcaagtggcagagctgagcctggacccagagcagcctggcctggccgtgggttccacagtcgtccccctgccaccaggctctgggggagcgggcggaggcatgtccagcggcattcctccaccacctgctctgcccatggtggggcagcctgggagaccccacacaagcctgggtcctgggggcaggtgcccgagacacgccccagctgagggttctgacctgtggcttcttcctttcagactccaaggggctctcgaacccggccgaggtggaggcgctgagggagaaggtctatgcgtccttggaggcctactgcaagcacaagtacccagagcagccgggaaggtgggtcccgccccgtcccacacacaccccagacccaggctcttgtctccagagcccccaccccctgcaaggccattttatgtgaatgagaaggtggcaccctccccaggcccagcccatgccagcaggtcctgagcaggcagcaggaggtcctccaggccagtgggctgtggcgggcacaccccacaggcccacgtcgtatccccactggaaggattaccttgcacctggcgcatagtaggtgcttctctttgttcagtagatagatgaaggctgtgcttcaccccccactgcgctcccctaccaagcagaaccaccagaggccaggcgacaccagcacatagtaggtacttcacaagcatgtgtagaatggatggccagatgcccacacatactaaacactctctacaagtgtgtacggaataggcggtcacggcctgagcgtagcgctcatgtttcccccctgcccggctgtgggccctggaagggctggggctccctcatttctgagtccacagtgctgggtgcacagtaggtgtccaggaagagaaacgtttgtggatccctgcctgggattcaaagtcagcgctccagattctgcctcttctctctaaaggggcatctcctggcctcttgatcctcagactgtggggcggggagggggtcgggggaggtggggcccagcagacctcataggacacccaggccttcccgccaccagcacatacacagttaaccgtgtccccgctgcctgcccagccctcatctggcttggtttaaagtgaaacttcccggaggacgaggacaggagggggtggcaggcagcttgtttttcctggctttctgccctggcccatctcgccagctcagcagaaaacagcttgttctctggcccaactccagcctctgcgctgtttttgcctttaaaacaaggcctgtgaggcagccaaccacagagcttttccctgaaagaaagacttcgttaataattaatgaggtcctgcagcccctggaggggccgtgtggagagactcaggccgtgcacaggggccctgggcagacacggccagccggaagggacacctggttccgtccccatagcaccctgtcctcagcggcagctgctgccctcatgcctggccctgctatccctcttcccagagccccagacttcccccctccctcccgcccccccactggtccctgccccaggaaactccccagggatgggccaggccctgaggaccaacccgtgctccctccctccccggccagccttctctgaccatgctgtgcccaatgccagcagagctatttctgaggaaggggtggccctggtctggggcccacagccctgcacaaggtgccgtgggaggcactcatggggtgctgatgctttatggaaagggtcttgcaccgttacacagctcccaagtcaggcctggctccacctgcagtgggggtgcagcctgactccccctcccccgcctgatgctctttgacttcttggttgcccaccatgtgccgggcctgttccctgcgactcaccagtgtgctcagcagccctttcccttacaagccccgcagtctcttgctgtgatggctgctgcagccagatgcattactgatactcacacccgctcccggctgtcatggcccacagtttttcattttttgagagacagtctggctgtgtcgcccaggctggagtgcagtgctgcgatcgtagctcattgcagcctcaacctcctgggctcaagcggtcctccctgcaggcatgcaccaccacgccttgctactgtttttctctttttcttttgtagagacagggtctcactgcgttgcccaggctggtctcgaactcctggcctcaagccatcctcccacctcggcctctcaaagtgctgagattacaagtgtgagccatcatgcccaactgcctgcaatttttaacttcttcacaaagagctattcagtctgccctagccagctgctgtctggcccctggcccttcatctccgtcctcagacccagggatctcccttcactctgtcctggctctgggttgccactgcctctgtttccttctagcctcccctccttccttctggaggcttggcataggcagattcagggctacagaccagcctcagaggggttggggtatcagacacagccccatccccagggaggcctccagtgccagggcagaactgcccatgccccttgcccggccctcaccagacctgttccctgcaggttcgctaagctcttgctccgcctgccggctctgcgctccatcgggctcaaatgcctggaacatctcttcttcttcaagctcatcggggacacacccattgacaccttccttatggagatgctggaggcgccgcaccaaatgacttaggcctgcgggcccatcctttgtgcccacccgttctggccaccctgcctggacgccagctgttcttctcagcctgagccctgtccctgcccttctctgcctggcctgtttggactttggggcacagcctgtcactgctctgcctaagagatgtgttgtcaccctccttatttctgttactacttgtctgtggcccagggcagtggctttcctgaggcagcagccttcgtggcaagaactagcgtgagcccagccaggcgcctccccaccgggctctcaggacaccctgccacaccccacggggcttgggcgactacagggtcttcgggccccagccctggagctgcaggagttgggaacggggcttttgtttccgttgctgtttatcgatgctggttttcagaattcctgtgtggccctcctgtctggagtgacatcttcatctgctctgaatactggtgcccagccagcccgtgacagcttccccctaatcaggaggggacagctgggggcgcaagctggtgtgtcatcagcaaagacctcagccgcctcggggatgagaggggactcgtggggcaagcaagctgccctgtgctctgagtgagggggaaggtagcccctttttccaaagataactcacagttttgccctcgagccaatgagaacatgagctgccctctgtgcaaggtttcggggccacctccaggctgcaggggcgggtcactcacccccctgttttctctctgccttggtgttctggtttcagactcccgactccccgttcagaccagagtgccccggcccctccccagcctgagtcttctccttgctctgcggggtgggctgaggcttgtccttgtttcctgcagggctggccctggctcgggcagggtggggcatcaccacctcactggccttgctggaggcacagggctctgcggacctgcagccatctgtgaggcccgcggggatgggaggggaggagggtggcctgttggtttccctcagagggggcaggtggcctggagagagaggggctcaggaactgggagcctcgtgggtggggcagatgctccgcggcctggagtggctctgccggggcattggtgggacccctgctcaggccttctctctggctgccagttgtgtctaaaagactcttggaatctgagaacccggagtcgcagcgccctcgggcctgggccacacgcaggccctggtgggaccacccagcctggtattgtccacggacagcgttgttcacccagagccttacttgggagcctcactgaacgcctgctctggttgaaggtggggtgggggcggggcttggggcctccctggctcagcccagtgcggcctggcgctcctcccgcaggctctgcccccgggctccggtggtgcggggccctctcaggttgaactcgcctcttttgcactggaaggccctccctttggcctgagtacttttcccgttcacgcctcagtcccgtggacccagcctttgtcagtggcaggtgcctgaacagagggtggatgggggggataccggagggggtcttgtcttcccagccgcagtctaggaatgatgcgggggggtggacgccttctccatagtctttccccacctggagcaggggcttcctcagtggtgaggggagctgcctacaggttggaccgggaggcagtggcttggagaggcagctttccagccttggtggggaagaaagtgtccattctttgccttcctggagctcccagccagagctgagcttaggcacccgagtggagcctgcagctgagtctgtgcccgagacaggctgtcagagattccagaagcctctcctccccgccgccctccacccctgcctttcagcgttgtggatccctagaggtggccccctgcccgatccaccgtcctgaggcagagtgttgagcctcatacctgtaccaggtccccggccagctgggcccctcccaggcactgccaggaagccccagctgcccctggcgggtgtggtggaaatggcaggagggtgcaggtactcttggggccccagcggtgggagtgcaaaagacccaacgccaacacctggtgccttctgcagccagcgcccacccatccgtgcccggacccttgggaatgcccgcggctccagaggaaaaagcccagggacggggcctccgttgcggggggtcggctgcttcttgggaactttgtcgtttccggcgctggctggctggctggctggctgtaaagcactgaagccccccggccgccaacccctgaaagcagaacctggcctccctggccacagcagccttacccaccgctctacgtgtcccgggcacttcccgcagccttcccgtccctttctcatcggccttgtagttgtacagtgctgttggtttgaaaaggtgatgtgtggggagtgcggctcatcactgagtagagaggtagaatttctatttaaccagacctgtagtagtattaccaatccagttcaattaaggtgattttttgtaattattattattttggtgggacaatctttaattttctaaagatagcactaacatcagctcattagccacctgtgcctgtccccgccttggcccggctggatgaagcggcttccccgcagggcccccacttcccagtggctgcttcctggggacccagggcaccccggcaccttcaggcacgctcctcagctggtcacctcccggctttgccgttcagatggggctcctgaggctcaggagtgaagatgccacagagccgggctcccctaggctgcgtcgggcatgcttggaagctggcctgccaggaccttccaccctggggcctgtgtcagccgccggccctccgcaccctggaagcacacggcctctgggaaggacagccctgaccttcggttttccgagcacggtgtttcccaagaattctgggctggcggcctggtggcagtgctggagatgaccccgagcccctccccgtggggcacccaggagggccctgccggaatgtgcagcctgtgggtagtcggctggtgtccctgtcgtggagctggggtgcgtgatctggtgctcgtccacgcaggtgtgtggtgtaaacatgtatgtgctgtacagagagacgcgtgtggagagagccgcacaccagcgccacccaggaaaggcggagcggttaccagtgttttgtgtttatttttaatcaagacgtttcccctgttttcctataaatttgcttcgtgtaagcaagtacataaggaccctcctttggtgaaatccgggttcgaatgaatatctcaaggcaggagatgcatctattttaagatgctttggagcagacagctttagccgttcccaatccttagcaatgccttagctgggacgcatagctaatactttagagaggatgacagatccataaagagagtaaagataagagaaaatgtctaaagcatctggaaaggtaaaaaaaaaaaatctatttttgtacaaatgtaattttatccctcatgtatacttggatatggcggggggagggctgggactgtttcgtttctgcttctagagattgaggtgaaagcttcgtccgagaaacgccaggacagacgatggcagaggagagggctcctgtgacggcggcgaggcttgggaggaaaccgccgcaatgggggtgtcttccctcggggcaggagggtgggcctgaggctttcaagggttttcttccctttcgagtaatttttaaagccttgctctgttgtgtcctgttgccggctctggccttcctgtgactgactgtgaagtggcttctccgtacgattgtctctgaaacatcgtggcctcaggtgccagggtttgatggacagtagcattagaattgtggaaaaggaacacgcaaagggagaagtgtgagaggagaaacaaaatatgagcgtttaaaatacatcgccattcagttcgtttgttccgtgtggggacttttttgtttggagcgggagggcccgcgatcagcccccaccagcccaccctcctgtccaccctacctgccggtcctgtgcggcgaggctggcatcctctgtgggccatactcttgagagttctctccctgtccactgggctctgctgctcctccaaggggcagggggctggggcctccgtgagggcacctctcagcagccgtgggcactgggcctgtgggcgcctgcggagcacgagtgttcccacctgtccctccccaggctgcctaagcatccacgcctctgcagccacgctggcccagatgggcaggaggtgcacccagagggccaaggaacacacgatgtcacccagctgccccaataacaacaagttaatgatgccccatctgcattgtctcctgtgataaacgccctctgtctccatgctgtctggggctgggctgctcccggcctggtttggtcttcgtgcccggagccctctcatgcacctgtgtccagccaggcaccctccccgagaggcaccagacacactgaagatggggagtggggctctgaaggtccaggtcctgccctgtggtggtgggcagaggacagtgtggcctgtgcccagagctagggtggctcccgggtgagacttaaaatggaacggcctgccacctgaaaggcagggacttcctgatggcactcccctcatgagcacacacacattcacacacgtgcatactcaaacacgggcacggacacgctcacatggaccctcgcacccattcatacgcatgcacacaccacgtgctcacacagatgctttggcatgcacacccatgcagaactgctcccgtgcacacacccatcgctgcccttgcacacacccatgcatgctcccatgcacacacacccatacaggctcagttgcacacacccatacacgctcccgtgcacacacccatacacgctttcatatgcacatacatccatattcccatgcacacacacccatacacactcccatgcacacacacccatacatgctcccgtgcacacacacactcatgaacatacacacttgcactcagccctggaaggatcgacagaacagtgggggtcttgggtgcggggctgagccagcctcccttggtggagtcaggaccccacaccaacattctccctcttcctgggaacggcggctgtgcggctgtgctctgaaactctgggccactccctgggcccccaaccatggctgaatggtgggtgccacaggagtctcgactcactttgccatcttaggagcccccctgggtcccagctgcacatccaaaggatcctccctgggcttcacaccctcccctgccagggcctcggctctgcccactgagaccaacctgggcttctccagaggggtccaagtgtgaatggaccccgagggagggcggagtccttgaagtggccacccgcttcctctgtgtcggcacagccctctgccgacct

SEQ ID NO: 531 - DNA, 212455 bp, Homo sapiens
  source 1..212455: mol_type = genomic DNA
cactgcactgccggggtgagagagcaggaccttgtctctaaaaaaatttttcagcatactttttttttctttggagacagagagtcttcctctgtcacccaggctggagtgcagcagcaggacctcactgtaaccttcgcctcctgggttcaagctattctcctgcctcagcctcctgagtagctgggattacaggcatgttccaacactcttgctatgttttgttttttttttttgttttttttttttttgtatttttagtagagacagggttttgctgtgttgaccaggctgttctcaaaatcctggcctcaagtgattcgcccgcctcagcctcccaaagtgctgggattacaggcgccagccccgcacccgccaaaaacacacaaaaattatcagggattgtgtttataaatttagttacttttgaaaatgtttttacattttgaactttcctgtaaggactattcacccattgcattgattggtgctcacagcacttaatacttgaacaaggggaattcaaggacatgctcttatcccctttcaagtggactcagaaggaaaacaaaacaaaacaaaacaaaacaaacaaacaaacaaaaaaaaccccacaatcaacaagaaacaggagaggcctcaaaacaagcagggctctctccctggggcatctcacttttttttttccttttaaaccacaaggccctaacagaggagcaaactccatgtggtttcttaactgtttcaaaagtgatcaatcaccaaatcgaatgtgacgtgcattgtcaccttccaaggaaaactctgagtagtcttgaaagatagaatcacaaaagggaaaaatcacctctccagggctagttcccttataaaataaatctgtcctggggcttccccttggaaaaacacacacagggccccaagtgtgtgtaggctgactggctacacaatcatttgaatttagtttcgaaaatagcccttccctgtgtccctaatgtaaaggaataattaaaacccaaagcgcatttcccttaattagccgaaagccctagcaatgcatggcattgtgggcattcaggagccaaaatgcccccactcataaaaaatgatccaaacaatggctcgtgcccaagctttcacacttgttttgcagagaagtcttggctggcagaggcaggatttgtaattccttgggtcgcttgacttcacgaggggcgaggtatgcattgtagcgacacggactacttgtgaagcctttgggcgggagtcgcttaaagattaactttctcgggtttccgttaccaaaagcgtttccgtgaatagcgtgattggaaacttgtgcgggccggagaccgcggcgcggctgctctttcaacaggcgatttgttctcctgtccgaggctcatttccatgcaaagagcctgacatcagagcaccttttgttgctaaacgctttctttagcctcgagggagagagtcatgtggagctggaagagctcattttgaagagaggggtcccggggagctccctccaagatctagaggctccgcggccacccctgccgggtcctgccaagacttgctagaaggaacgagtcgcgtgccttagttagttggttcccgtcacaggaagaaacgcctttgcagtgggtttaattgcttctgggccgagcgaattccccgccgtacaactcagtggtgcggactttgcctcctgctaccctgttgctgcgccgagcggggtgggaaagtttctggagttgtcagtcgcgcagcccgtggccacctagacccgaggtgcgggcgcctgcgaagggcccccgcggggtggccggggccgccggggcatgcagcgcgggggcgcggctcggtgacgccgcgggcggggacccggcatccgggcaggctgcgcgcgggtgcggggcgagggcgccgcggggactgggacgcacggcccgcgcgcgggacacggccatggaggacgcgggagcagctggcccggggccggagcctgagcccgagcccgagccggagcccgagcccgcgccggagccggaaccggagcccaagccgggtgctggcacatccgaggcgttctcccgactctggaccgacgtgatgggtatcctggtaagttacctggggagggggcggcgcaggaagtacagttcgcagcagcccctctgaaaccgggggctcccttctcgcccacccactgggcaacccactccgcagaggcgtccttctctggctctagttcttagggggctaaatacacacagtataggatttcaaaccctaattaaaaaataaccagccacaggtcccgtcaaaaggtgttttttaaacaatcgggtatgatattcaacagtttaatctgggacacctgctgacatgttggtgtggaaaaggcgagaaagaggccttcaaaaagtagatgtaaataaatatttggttggtgctggattagggaaaaggctgatgttactgatgtttatctcttcaccatttgttgtgtgaccacaagagggaaaacaaacatttccttactcagaactgccaaaatgtttgcctacttttttttgcagtttttcaatttgtggagttacaggatatttgttttatatgtttggggctaaaacaataggacttattttgctaaatctgtgctgtcatgtattttgaaatgtccagtgactaaaagcgcccctggatttggcatagtctctgggaagcagttcttctgtatggagggtgaagttttaacctgctcagggttgaataccttggggaagtaatagatttgctttggtggagctgtagttaggcaggtagactggaatcagatgggcgaggtttattacagtcagacatcttaatccatacataaaagacaactttagtttaaagacttggaatggccagatgtgcagattatcagaaaagtctctagatttgctttgagatcttatattttttgagtgggaggagatggagtgaaagttcttctttgggaatgataaaccgtgtacagtttttagcacagtgattaaactcttgggcttcaaagtaagttatactaggtcaaatgccagctctccaattgactgtttacatgatcttggccaagtcattcaacctctctgatcctcagtttcatcacctgaaaattgaagaaaagaagacttgcttcttggggtttctgagatttagctgggttgatgtgtgtatcaagtactcagcagactgtatagcatatagtagaggctcaataagtgtagctgtctttcaggttttatttgtttcctgcaaagtctcctgtctcttccttctggacatcctaaaagcccagttactccattttcaggtgaccattggtatttatgattcttactatacagagaaccagcgagcgttggttaaagatttctatctgctcttgtcactctccagtattgaaaaatgtatataaatatgcatgcaatgtatatttacatactatatatagcacatgtatataatatacctaaatctaatatatattttagatttaaaaggttttgtttttgcattttctgaagtatacagatgaatatgatccttcactgaagttccagaaaacctaatggacattttaaagttgtgataaactttttcttttcttttttttttttttttttgagacgaagtcttgctccgtcgcccaggctggggtgcagtggcacgagctcagctcactgcaacctccgcctcctgagttcaagcaattttcctgcctcagcctcctgagtagctgggattacaggcgcgcaacaccacacccggctgatttttgtatttttagtagagacggggtttcaccatgttagccaggctggtctcgaactcctgaccttgtgatctgcccacctcggcctcccaaagtgctgggattacaggcgtgagccaccgcgcccgatagactgtttttaagttatcctgttatttcttgtctagatccagttctaagttttcagtcactgaggaaattggtttgataatatcccattgtatcccttactctagggcgttgggctgggggcggggaggattgggggcctgtttaaatgaaacttgggctgagggttcttttggggaagagggttggccagtggcattttctgcagatttgctttcccttccctgacagattccagcactgttgggtcagttgtagtggagtgttctttggctgagttaaaagatggggtggggcttcagaagctcaaacctgctattgaaagggcagatgcaggagcaaagaaaatatgtacttcagctaatcattcaggatcaggctgggaagaacgtaaagcctgtcccagacaggttgtgtttgctcatgttttcctcttgtttatctggggtaaacaggcatggagattgttccttagtaaaattcagaggaagacatggcttactgctcctttgtagatgtcttgcagggagacaccaggctaaaagggagggaaagctgtcatccaagtgtttatacaaactgagtcttcggggaaatacatcaagacacaaaattaacagttgactttattctcactgaaacaagagacaccatttccttccttttttatttaaaatataagattttgcaatcatctatcaatctagacaggtgaagtgacttggccaatggcacataccatgttagtgacaatgttagacttgtccctggtcgctggcccctccagtagggatcctgatgtcatgacgctccatagttaactctcagatgaattcagtagaaatgtagttcagtacatttagaaatcctgtgtgttttaggtaaaatgtgacttacaagattctttttccgtactgaacttgaagaggacagtagaggtagttgggaaattacacatctgaacattatccttaacagatttcagacacagttctaccttactttttcagattattctaattgtggaaatcaaaccacacagcttatcaatactgtatgtggaactttgaaatgacaaaactcacagcttagtaagtgaaaacatttttaggtgaatgagcaatattgagcagttgtcccccaggggattttgttggttataacccagtgaaagtattgccccagagtcatggatctcagtaaatacaggatggttgtttgagttcattaggacacattttgcatttagattaattcagtccatgcacagttaagcaccaaatagttgctttcagataattgttaacaaagtgctcatttagaaaagaaataatagtataatttacggcatgaaaatgtttgagcagtactagaataaataaatgctaataagtgaatatataaatggatatagaattaagagaaaacaagcttgcaaaaaaaaaaaaaaattaactagattgtgagtgcctggagggcagggtcagtgtcttactcatttttctatctccagtgctcctgacttaactgggtgctgagaacatggctttgttgaaagaaaaaggggaaaagtatgtatttcttaaatgcaggagtcacatcaaagcattgttctgtcaagacacatgtgcctgctgtaatgtaatgggttacatttataaagatgtgaatacattctgctctggctgaaactgcattttgggcagtttcatcgtgcaaattaaaatcccagtgcttccactggaaactaatggtaaactgcaacatgtttataagccctgagctattaaaccttggcgttcttgtgaaatgtgccattctgttcactaacaccacgacatgtggtaggccagggttttcaaagcatgtcacttctccctgtgacatgtgtagacttctattgagaagtgcaaaactgagttagaatcctgtggaattttacccttttttctttactccatagttggcagacacggcattcctttttttaggtaggggagggaagttgtttttaagagcgggaattgctaaggttgttgatacagttaggtgtggtagatccttttttcagaactgatttatccatttggtaaattgtgatggttcttcagcttctgcctacaggatttgaggacttctaaggcaaagccttagaagcctttaaatctacttgttaactgggaagggggttagtaagtgcctattgtttgcaggatcctgcaagatgcacctcccccaaacctgaaatttcctctgtttttgctctgtttctacaatttacacccatttcccagcatgtttaaaaaatatccattgtatagagatactccgaaccttcccctactctaattcctgtgcaagctacagaaaggcaggcatcagtccacagaactgctatattcatcctatcttactatttactccattcctaaaaaattaacaagaaaacccctaaaacaaacaaacaaaatgtctccctcttttcctttgttgttttaggcccagtgtggggcggggagatgttagtgagatcctgagggggcttttaaaatgctaactcctttgaaagcagttaatttacatgttctcttgggaggtgtctagagttgtgcctatcagctaatgacttaattaattttacgtcttggaatttgagagtcaagcacatttcaaatattctgacttcaccttaattttatgatgttccttttagcccactgaagaaagccttgtggcctctctatgtggagaagttgcagggttatgtactggaagggattgaagcgcccttggaaatgcaccctcaactctcatttagagagaagggtttggagggcttccaggtgtaaaagacttactcagggtaacagagaggaggcagaactcaggcgtctggatgttcacttctttggcaaagactaagtcaatggctttcataattttatttatttatttgtttatttatttatttttgagaaggagtctcactctgtctcccaggctggagtgcagtggtgcaatctccggtcactgcaacctctgcctcccgagttcaagcgattctcctgcctcagcctcccaagtagctgggattacaggcgtctgccaccacacctggctaatttttgtatttttagtagagacagggtttaggctggtctcaaatccctggccacaagtgatccacccacctcggtctcccaaagtgctgggattacaggcgtgagccactgcgcctggccggctttgataattttggttggggttgccgaatcttttcctgctaaaggagaccccttaagcttaagtgaccttcttccatgattcccttctcctgcctttctgcctttatttgctgttctctaccttgtctttcttttgctcagccatacaacccttccctctgccacctggcttcttactgaggtcctttgcatgcagctctatggggacggagtgagaggcagtgctcctgtgtagagtcctggggctgtgctggatcttgcgcatacatttccttacttgatccttgtaggaggtgtggtcagtgagtattcttgccctcattttacagttcagatgtaaacgtctgtgtcctaagtcatgcagatagtagatggggaagctgagagttggatcatgtatttccctgaaactgacttccatttgcaactgtgtatagttcattctttcacacatcttcttcagacgtttattggctgctaatttttgtttgtttaagctattgagctattagcgatacttgcccttgaattctacaaaaggttagttttgctgcaaaagcctcagccccacggtcgctgagtatatacccaacctcacagggcagtgggcagagcgccccgaaggcggtaggatcccttcactcaggatcagcaacccaggagcgtctgggcggcccctaccagacatacctttggatttgggccctgagggataagtaggagttcccagagaggtcttttctagtgagagggataaaaaggaaggtgcgaggtgggcccttccccacagagcaaagagggacaaaggtggaagggcacagatctcccagatctgggtgctgatgttgctggataaggtttgtgggcaccggtgaaagaggccattgggcatgggactacttgcgtctgtgttttggaaaagtaacttttttatttcattctttcttctttctttctttttttttttttttttttttttttttttgagtgagtcaaactctgttgcccaggctggagttacagtggcgcgatctcggctcactgcaaccctcaaccttccaggttcaagcaattctcctgcctcagcctcccaagtggctgggattacaggcatctgccaccatgcccggctaatttttgtatttttagtagaaatgggttttcaccatattgtccaggctggtcttgaactcctgacctaaggtgatctgcctgcctcggccttccaaagtgctgggattacaggcgtgagccacgacgcccgcccggccagaaaagtaacttttgtaggcgatggggtggcaatgaggttggagggaaggagactactttagtgacccaggcagggatagtgagagccccaaccagatgtttctgtgtcgagtcattacctgtcctctggctgcctgaggcccaacactttgtacagtctctaaagtaatcaagactgctccatggtaactttcttttgataattcttttatgctcaagagtgggctgagttaatgcaagacattttagagatgtcgtatgccttgtgattttctttttttctttttttttttttgagacggagtctcgctctgtcgcccaggctggagtacagtggtgtgatctcgactcgctgcaagctcctcctcccgggttcatgtcattctcctgcctcagcctcctgcgcagctgggactacaggcgcctgccaccacgcccggctaattttttgtatttttagtagagatggggtttcaccgtgttagccaggatggtctcgatctcctgacctcgtgatccactcacctcggcctcccaaagtgttggtattacaggtgtgagccaccgcgcccggcagattttctttctctctaaaggaaaaggcggccaggcacagcgcctcacacctgtaatcccactgctttgggaggccaaggctggaggatcgcttgaggccaggagttagaccagcctgggtaacatagcgagatctcatctgtaattcttattaaagaaaaaagaaaaaagtatctatccatgtatatatgtacaaatatttgtatacctgtctctctatactgatagaatgtggttccttaaaagggggaattattatttataacaatatgcacaccactgaaagatctttaaatcattcttttaaaagctaattgtagagtacagtgaaatagtgggaaatatgtagttcaatgcaaatttattcatttgcaaatccgtagctcaattttacaaaggatgtaagaggaaaaactattgtttatctaatgtgtcctttttaagagtgctgtggtgctacctgattgtttcgtgtctaagacttgactgtcataatcccactgtaatagacgatgtgcctacctgtggttgacacacattcttggcattagtaaaaatgaaattggtctcaaaagagtgaatctaaatggacagagactgactctcactatcagtgataccatttaatacctgtgagtacagactgagactacaagaattaactaaaccttcagactaattttgagataaaatgtattttttgagtacataaattgtcatttttcaaatgatatgctcatctatttattaattcacttttgtaagaagacctgaaaatggtaggtctcttcctcattagctttgctcctagccagatgttgaacgtcccttcttttgttctctgaagtgtttcactgggcagcattaattctttatgaggagagatgcttcacagagataacctatcttgtatctttcctgccatgtcaagtcatgtaatacagacatctccatcctggagactgggtatccaggcattatggtaactctgagactcagaagacaaacgcttgagaaagggctagtatttcctttctgcgatagtagtttttttttttttttttttttttctgaaaggctcttctatggctttcaagatgattggtgaaaatggaaatatatttgtatttatgtttgtttttcaagatgattggtgaaaacggaaatatatttgtatttatgtttgctcttcagactaatgttctctgtgttcacagagatacattgcagttctccttgggtgtctgatgcaagttccattcatggttgattttgatgtttcattcactatttgctagattccttttgcagcaagtagtgagtgaggaagtttccatgtgtccacccatcactctgcctggttgtggcttccttctttctcctagcatgaggtagtaagaaagaaaataaaagcattataagaatcacatgatttttaagtaaagagccattgaggagcagaataaaaaatcttgggatatgccctgagccctagttactcaccgctttttttttttttttttttaactgcccttaatctagtaggacctagtttcctttaaaatgtatcctaagcacccttgactttgttgactttaataataattttgtattggtcttgctgtcagccaacaattgtttttaacctagagctaaaacatgtttatgtgtgtgtgtgctttaaaaatttagtgtttcaacattaaattatttgtagaggaaaggaatactctagttcaagaatatgtatctttgctataggagtttgtctttgtctgttttcataggattttaaggacctcctttgtgaaataaaccattaacaactttgtagcattccttgtttggaaatgcccagtcttttaaaaaaaaagttttgaaagagaagagtaacaaccttaatctgtgagttaaaacatttagaaacaaacaaacaaaagttaattgaacatctcttagaaaactgataggtagaatagtaaagtagttaagagcaaaggaactattttaggttgtttgagttcaaattgtggctttaacccttaccggacatgtgacctgggtgagttatttaattattctgtacctcagtttccttatctgtaaaatgaggttaacagtcaccaacatcattgggttctcatgaggattatttaaataatgagaacaaaggccaggcttggtggctcacgcctgtaatcccagcattttgggaggccaaggcggtggatcacctaaagtcaggagttcaagaccaccctggccaacatagtgaaaccccatctctaccaaaaatacaaaaattagccaggcatagtggcaggcgcctgtagtcccagctacttaagaggctgaggcaggaggattgcttgaacccaggaggtggaggttgcagtgagccaagatcacaccaccgtactccagcctgggagacagagtgagactccttcttataaataaataaataaataaataaataaataaataaataaataaatagaactgtgcatgacatacgatgagcagttcataaatgtgagttattggctgggtacggtggctcatgcctgtaattccagcactttgggaggccgaggcaggtggatcacctgtcaggagttcaagaccggcctggccaacatggcgaaaccccacctccactaaaaatacaaaaattagccaggtgtggtagtgggcacttgtaatcccagctactggggaggctgaggcagggagaattgcttgaacctgggaggtggaggttgcagtgagctgagattgtgctactgtacgccagcccgggtgacagagcaagtctctgtctccaaagaaaaaaaagtgagttattattaactactaacaatagttgaatctctttatttagaatatgaattaatatatctttattttaatctttttaattttttattttttgtttttcagaggcagggtctccctgtgtcacgcaggctggagtgcagtggtgtaatcaagactcactgctgcctcgcctccctgtgctcaagggattcacctgcctcagcctcccagtagctgagactataggcgtgcattaccacgctcagcttattatatttttcttattttttctagcattggaggggtctctttttgttgcacaggctgatcttgaactcttggcctcaagcagtcctcccaagttaacttcctaaagtgatgggattacaagtgtgaaccactgcattactaatttttcatttttaaatgaagggatgatgttctgattctacatgttcaatttaagattgattttttttttttttttttttggacagagtcttgctgtctcccacgctggagtgcagtggcgcgatctcggctcactgcaacctctgcctcccagattcaaatgattctcctgcctcagcctcctgagtagctgggattacaggcatgcaccaccacacctggctaatttttgtatttttagtagagatggggttttgccatgttggccaggctagtctcgaactcctgacctcaggtgatccacctgccttggcctcccaaaatgctgggattacaggcgtgagccaccatacctgaccaattgatcttaactattgatttgattgaggtaatatgccctttttaatatgtagcttaaaaataagtacataaattgcttcaaggtattaaccttcagtttacatattgagaaatatgtgtgtaaaatatcttctatactcacaagagaaaaaggctgtgtacagtggttcactcctgtaatcccagtgttttgggaggccaagacaggagagttgcttgaggccaggagttcaagactggcctgagcaagatggagagaccacacctctacaaaaaaaatttaaaagagtaaccaggcatggacctgtagtcccagctacttgggaggctgagtcaggaggatcccttgagcccatgaggtcaaggcttcagtgagttgtgatggcaccattgcactccagcctgggtgatggagcaagacattgtgtcaaaacaaagcaaaacagaacaaaaaagaaagaaaaaaagagagaaaatatgaatgcttttgaatagccaagattttctgaaaacaagaaaatgcttgtaataaaagtatattttctgtttaaatggtacccacattgccatttttagtttttttatgtgtctaagtggcacaataatataagagagcttttgaatagtttacttatttagaaacatgtaaaatattaaaagcattcacttatgatttcattttttgagtgatggattcatgaatgtactaaattggtttttataatcctgatttttttgtgttttttttgttttgttttgtagactcttttcccagggtttcattcagttagcagctattttttatgagctattttctgcaaatcactcattctgcatctttgagctttaattaagagtcttaggtttccagtcaagaatttataaagccatcatataacaatggccccaccagacttatgaaaaacttgaccacacatttcagcgtgaatatggcagaaaatgggactcattgtggtttgaggaagaactataagcctgtaatgaataaacctgccacttattttattttattttattttcccgcgagatggagtcttgctctgtcacccaggctgaagtgcagtggcgcaatctcggctcactgcaacctctgcctcccgcgttcaagcaattctccctcagcatcccaagtagctgggattaggggcatatgccaccacccccatctgatttttgtattttagtaaagatggggtttcaccatgttggccaggctggtctcgaactcctgacctcaggtgatccacccacctctgcctcccaaagtgctgggattacaggcatgagccaccgcacccggccaaacttgccacttacataaattgttattttgggatgatttagttatgaatctaaagagagcctacaggaatttgaaatctttgggaaagtctgtaaagaccataaacatttattctgaaaaggtaaaacatttcatttttaaggctcattttattgtgaattacagttttttaaaaaaaaccttctcagaatgtatggcattaagacatagtctactggggtatggtcattactgtcttctgcaacatgttgttgtaactcacctaacatgtgacgcccaggtggtgatttactggaagagcgtcataacactgatgtgtagtagcaatttgccttgattagaggattgggaaactgagacttcatgatgagcattaaataggtgtcaaatgattcctaaatgatatgtagaagatattataaaatcttcatgatgtaactttagcattatcaaagaactggctcctttttcaacagaagaaaatgtcagctagttaccccacgttaatattttgtatcaagaactctttggtttgtcatgcccctgagtggctgcatattctgagtctgggtctttagaaagcaggatgccttctatagtggaagagcttccatagagaccaggaggggagacgaatagaatgaacacattccttaaacctcgagagaagcttaccaggtcacatcccttaatctaagaagtgctgctctagagattagaatgatcatatttacattggtatgatttcttgcacttcatatgtacttttacatatgctgattggttttattttattttatttttgaatacaggttaaaaaaatttcaatagtttttggggaacaggtcaggtagtatttggttacatgaataagttctttaggggtaatttctgagattttggtaaacccatcacttgaggagtgtacacagcactcagtgtgcagtcttttatacctcatcctcttccacgcttccccccaagtcccccaaagtccattgtatcattctgtttttttttttttttcttttcttttcttttttgagatggagtcttgctctatcccccaggctggagtgcagtggcgtgatctctgctcactgcagcttctgcctcccaggttccagtgatcctcctgcctcagcctcctgggtagctgggattacaggcacacaccaccatacctggctaattcttgtatttttagtagagacagagtttcaccatgttggccaggctggtctcgaactcctgaccttaggtgatccgcctgcctcagcctcccaaagtgctgggattacaggcatgagccaccacacacagcccatgaggatgcctgtgcaagtgtctttttcatataatgacttcttttcctctgggtagatacccccaggagtgggattgctgcatcaaatggtagatctacttttagttcttttttttttttttttttttgagactgggttttgctcttgtcttggctcacctcaaactctgcctcctgggttcaagcgattctcctgcctcaacctcccaagtagctgggattacaggcacccaccaccacatccagctaatttttgtatttttagtagagacaggccaggctggtctcgagctcctgacctcaggtgatcctccagccttggcctcccaaagtgctaggattacagtgtgagccaccacgcctggcctacttttagttgtttaaggaatctccatagtggttgtactagtttacattcccaccagcagtgtaaaagtgttttcccttttcaccacatccatacccacatctgttattttttgattatggccattcttgcagaagtaaggtagtattacattggggttttgatttgtatttccctgatagtgatgttgagcatttttttcctttgtttgttggccgtttgtatatcttcttttgagaattgtctattcatgtacttagcccactttttgatgggattatttgtttttcttgctgatttgtttgagttccttgtagattctggatattagttctttgttgggtgtatagtttgcgaaaattttctcccactctgtgggttgtctgtttactctgctgattatttcttttgctgtgcacatatgctgattggatttatgccctcagagctactagaaacttcctgttgttggcatcctttggccatgtaaataatgtagggttcctggtttccttttaaacacacccacattttattcaataaccataattcaacaattgctggctgactttggcttctgcagattttagacttccaaactcatctgttttacctgtaaaacaggtaaaatactgagcttatatatctttgcacactgccccacagggtggaccagacccagatggatttggcctctgctctttgagcagagtttgatggtaaagccagaaagtctcccacagtctgggttttcccagtttccacccaggctccctggatcctggtgtcttggatgccagtgtgggtcagtgtggcaaacacctaaggctttgcatttgcaggtccatcaattccaaggtggtggagagaagcacagactcctactcctcattgtaaccagcttgagacaggctccagaacagcacccatgactgtccactttgttctttattgtagaaaatagaaaggcctacttccacgacatcgggaaagtcagcctcctgttgtcacctaaaagattttcggccaggcacagtggctcacacctgtgatcccagcattttgggagactgaggtagatggatcacctgaggtcaggcgttcgagaccaacctgaccaatatgatgaaaccccgtctctactaaaaatacaaaaattagcccggtgtggtggcatgtgcctgtaatcccagctactcgggagggtgcgacaggagaatcgcttgaacctgggaggcggaggttgcagtgagctgagattgcaccgcagcactccagactgggcaacaagagcaaaactccgtctcaaaaaaaaaaaaaaaaaaaaaaaaattcaagctgcagagcagttaggttttatcttaggtttggctttaaaaaaaaaatcaagatttgaagacacataaacctgttatttgtacacctgcagacagacttgcagacaagtttgagtatgttctatttcaagtcttgatgtataaagaagataatccagggcgagagttgctcaaggactgtaggtcaccgatggctcccaaggatcagccagagaccaatgagcaagtgaaagcagattggtttgaatcttgcatttgctggttggctcaagagaagtaagcactgaattatgcaatgcagttggcagggaggattgaagcggctcggagtgttgttttggcagaaaaactacttagcaaaatgaatgaggggagggaatagtgacacactaccttctggggtcccaggagggtctgtttcaaaataatttttatggaggcagagagaagcacactgatattgtaccagtgccttggttgtgacagatagtcactgttgtacaactagggatatggccagactcttaactatcttttaaaactagaagtgattacctttattgttttgcgttaaatttaagtcacccctccttagatgcttggttggttctttggtttcctgtttcctaatgccatgtttttgttttttttttttttttttttgagacggagtctcccttcatcaccgaggctggagtgcagtggcgtgatctcggctcactgcaagctccgcctcccgggttcacgccattctcctgcctcagcctcccgagtagctgggactacaagcacccatcaccacacccggctaattttttgtatttttagtagagacggggtttcaccgtgttagccaggatggtcttgatctcctgaccttgtgatccgcctgccttggcctcccaaagtgcagggattacaggcgtgagccactacacccggccctaatgccatgtttaaacatctgtggtccttggaatttttatttaaaaataaaaaaaaaatacaagtatgtatatataggcatacttcattttatgcactttgcagttatggcttgtttctgtttttgtttttgtttttcttgagacggtgtctcactctattgtccaagctgaagtgcagctgcgccatctcagctcactgtaacctccgcctcctgggctcaagtgattctcctgcctcggcctcctgagtagctgggattacaggcatgagccattgtgcttggccggttttttttttttttttaacaaattgaaggtttgtggcaaccctgtgttgagcaagatttttggtgccatttttccaataccgtgcgctcattttgagtccctatgtcacattttgaagctgaattgctgcaatctcatgattaaacctgaacagatgtggagttgcttcttatggatgagtaaagaaagtggtttcttgagctggaaactactcctggtgaagatgatgtgaacattgttaaaatgacaacaaaggattttgggtattccataaacttagttgataaagcagtatcagagtttaagaggattcattcctattttgaaagaggttctgctgtgggtaaagtgctatcacacagtatagtatgttaaggagaaatctttcatgaaaggaagagtcccttgatgcagcagatttctttattgtcttttattttattttatttttctgagatagagtcactctgttgccagggctggagtacagtggtgcaatctcagctcactgcaacctttgcctgccggattcaagtgaatctcctgcctcagcctcctgagtagctgggactacaggtgcccgccaccatgcctggctaattttttgtatttttagtagagacggggtttcaccgtgttagccaggatggtcttgatctcctgaccttgtgatccacccgcctccgctcccaaagtgctgggattacaggcgtgagccaccgcacccagctgaattttttttttctttctttacaaaccaaaggaaccagaaatttggttgtcacctgcttctttggaggacttcctttactgattcctacatggctctgcattccatgcttccttgatgcctcagagctcagtggacagaacaagggacgtccttcatttttttttttaatctagtcagtcatcgtaattgattttttcccaaggagttggattggaggttgcatttttgtgtgatagctggaatattctttgaaacttggctgccacaggacttgcttttaatgcctttgtttttttttttttttttcgagacagagtcttgctctgttgccctggctggagtgcagtggcgtgatcttggctcactgcaacctccacctcctgggttcaagcgattctctcgcctcagtctcctgaatagctgggattacaggcatgtgctaccacgtccagttaatttttgtatttttagtagagacagggtttcaccattttggttgaccaggctggtctcaaactcctgactgccagtgatctgccaccttggccccccagtgttgggattacaggcgtgagccacccccccgccaggctttaaagcctttttaacaaagatgctgtggggcagaaagaatggatgacctagtaataagagtaaggataatattgatattagctgcagttatttatggagcatggactatgtgttaaacactatactaagctctctccataccttaactcatttaattgttacagtgaccctgtgaggtgtggttgtgggttgattttttttcccacaaaaaaggatacctcgaagtcctaatccctggtatctgagtgtgactttgtttggaaatggcttcttttcagatttagccaagttaagttgaggtcattagggtgggccctagtccaacatgattgatgtccttactgggacacagacacagatgtgcacggggggaagatgaagtaaagacacccacagagaacagcatgtgatggtggagaattgcagtgatgcacctgcaggctaaggaatgccgaagatcgctggcagcccccagcagctaggaagtggcgaggacctctagcctctagaactgggagacaatacatttctgtagttttaagccacccaattattggtgctttgttatggcagcccctaggaaacaatacagatggctgctctattaccacagggtagcagctttgagctgttgggagaaagaggaaagtataaagacagcaaggccagacgcggtggctcatgcctgtaatcccagcactttgggagggcaaggcgggtggatcacctgaggtcaggagtttgagaccagcccagcctgaccagcatggagaaaccctgtctctattaaaaatacaaaattagccaggcgtggtggtgcatgcctgtagtcccagctactcgggaggccgaggccggagaatcgcttgaacctgggaggcagaggttgtggtgagctgatcgcaccattgcactccagcctgggcaacaagagtgaaactctgtctcaaaaaaaaaaaggaaagggaaaaaaaggacagcagaactttttccaggtttcctaccttgcacagccctacaccttggccagtagaaaaagaacattgagaagatagataagcagagagcctcaatatgaccctggccatggcagcatagaaaccgactcaggaaacatttatcaggtatgggttggaccagtgtggaagaagaagacaggggcctcctccagggtacttagtgagcaacaggagagacagagacagagggaagcacggtttccctgatgaatgtccagcatttcttttttctttttctttttctttttttttttttttttgagacagagtctcactctgtcgcccaggctggagtgcagtggcgcgatctcggctcactgcaagctccgcctcccgggttcatgccattctcctgcctcagcctcccgagtagctgggactacagacgcccacaaccacgcccagctattttttgtttgtttgtttgttgtatttttagtagagacggggtttctccgtgttagccaggatggtctcgatatcctgaccttgtgatccgcccaccttggcctcccaaagtgctgggattacaggcgtgagccaccgtgcctggcctcttttttttttttgagatggagtcttgctttgtcgctcaggctggagtgcagtggcgccatcttggctcactacaacctctgcctctctggtttaagagattctcctgcctcagcctcccgagtagctgggattacaggcatgtgccaccatgcctggccaaatgtccagcatttcttactaggttctatgagataagcagtgatgtggactgagcaatgaggaagagattgcaatgtgccccatcttccctcccacacaaggcctcagtctaatgcccctggttttctcccctttcctgcttgccatttttactattatatgccttttttttttttgaaagtgaggtgagggtgagggtgtggtcgtatgaggaaacggaggcttaggaatgctttccatctttgttttaaaatagtggaattgagcctgggtaacatagtgagaccccttctctacaaaaaataaaaaattagtcaggtgtggtggcgtgtgactgtagtcccagctacttggaaggatgaagcaggaggatcaccttagcccaggaggttgaggctgcagtgagccatgattgtgccactgcactccagcccgggaaacagagcaagaccttgcctcaaaaatacatacatacatacaagtagtggaattgagttaaagtttcctaaagaagataatacctctttgttttcctctttgaatctcaactgctacctatcccaactgccacccaggacagagctgggagagagggtgtggagagaaagttgtagtgcagcatagaagtcttattggtgcagggattcctgaagtggcttcttaggtctgggcagatatgctgatgtggggcagggaccctggccaagggttttgggcatgggctgcatggctgcaaaggaaccttggtggtgatatccataaacacagggctgccctgcctcaccccttggcctcaccctttgaattccctgtcctcaatcctttgaatgcaacatcagatgaatcacggtgttctggaggacgtggcggtggatagtgttagggacggagtgattgaggctcttctttattttttttatttatttatttttttgtagagacagggtttcaccatgttgcccagactggcctcaaactcctgggctccaatgatgcgcctgcctgggcctcccaacacttcttttttttttgagatggagtcttggtctgttgccaaggctggagtgcagtggcacgatcttcgctcactgcaacctgcacctcccagattcaagcaattctctgcctcagcctcctgagtagctgggattacaggcgcccgccaccacacccggctaattttctgtatttttagtagggacggggtttcaccatcttggccatgctggtcttgaactcctgacctcgtgatccacccgtctcggcctcccaaagtgctgggattacaggcataagccaccacgcccggccgattgaggctcttcttaacctctgcttcagacccctcctggtaccacctcactccctggtctttgaggctgtgtaagatgtgcaggcatcttacaagatttggagagtcagaaatcactccttgctggattgctgagggttagcaatgaaagtaaaagaggatatggagaaaatggaaaccacttataggatattttattccctgtggattctataatggacattttaattaaactctaatgggacatacattctaaaaagttctgatccctgaataaattaatattaatgcccaccattcattcagagtaaatgcattgagagaaatgtcctcaccaagtaatataaaaatggagagttagaaaaataaaatttcccagctcatcggcagcccatcctgttggtaaaggactgctccctctggtccattactgcccattacttcctccagctccacgtcaatgactcatgccaaaacctccatcacttccctttggagattattacacagcccagcagacatcctattaagaaacttcttattagcagaggaaaaggaaagttttcacgttgagatcgagaaggaagatgattcatggtcacgaagggaaaggtcccctgaagtcttgagagatggctcaccactgctccactttcctttggggacacacacactcaccattagctgtgggaagtcgatggggtgtgtggagaggaccatactcaattaaaagaatgacagtggaatcagtaattttgaatcaagctcagcgatggattacaaaagcaagagtgtagactcctaactaatgtagggtggaagttgaaacgtgaaagttgcctgtcctgagcacgtttagagttcacaattcaatattcaagaagaacgtaaggctagcagttgctatagttgggacaggaaatgactcaagtccaaaaggaaggtttctgtagatacaaggtcaagatgagaataggttctgccacgggaaatgggaagaacacaaggatagagtctgcatcatccccaagggttctgaccataggaaacattgcaaaatagtacaaatgaagcatggagtcaaagataccaatattaaaaaattaagaacattccatgattaacaaaaattttccctccggccgggcacagtgcttcatgcctgtaatctcagcactttgggaggcttaggaagacagatcacctgaggtcaggagtgggagaccagcctggccaacatagtgaaaccccatctctaccaaaaatacaaaaattagccaggcatggtggtatgtgcctgtaatcccagctacttgagaggctgaggcaggagaatcacttgaacctgagaggcggaggttgcagtgagctgagatcgtgccactgcactccagcctgggcaccaaagtgagactctgtcacaaaaaaaaaaaagaaaggagaggaaaaagaaaattttcccttcaagtatttcactgtgtcaggtactttgtgatcaagctagctcccagctgtcatgcctcattatcatatgatttacaacccatgattgcttttttaaatcgtatggtctgttgacattgcaaaatcagtatttctcttctttgcacattctttagcacctactatttgtatcagtcatttgacatttacagtatttaggaagcctgatggccattttttgttttattggatcaaattcttttactatcttttttttttttttaactgagacatcttgcagggcacagagttctctgcaaagatattgttggttctcctggtagaggtgatgaggagggggtcatactgaagtacatctcattcttgcccacctcatgaccatatttccctttaagaattcaaatgatgcatcctccatgatcgatccttaagcacctttgatgtcttgctctcccttgctgaaatggctcacataatgggagctttaactgaaggagagatggagctaggaatataaagatcatttttgcctgggtgtagtggctcatccctataatcccagccctttgggaggctgaggtgggtggatcgttgagctcaggagttcgagaccagcttgcacaacatgatgaaaccccatgtctacaaaaaaaaaatacaaaaattagccgggcagggtagctcgtgcctgtaatcccagcactttgggaggccaaggcaggcagatcacctgaggtcaggagtttgagaccagcctggccaaagtggtgaaacctcatctctactaaaaacacaaaaattagccaggcgtggtggcgtgcgcctgtaatcccagctactcaggaggctgagacaggagaattgcttgaacctgggaggtggaggttgcggtgagccgaggtggcaccactgcactccagcctgggggatagagtgaaactctgtctcaaaaaagaaaagaaaaaaaaaaattagccaggcatggtagcgctgcctgtatttccaactacttggagggctgaggtgggaagattgcttgagcctgggacattgtggctgcagtgagctgtgttcgcgccactgcagtccagcctgggcaaaagagggagagcctgtctcaaaaacacaaaccaaaaaaaacccatagagatcatttttgagaagaagtttaagaaaggtagacactgtgctgaggaacttagttgctaagatatagacacaagaaaatattggatacttggaaggagacgagcagacaacagaacaagaagaacttcatttaaagtcttgtccggacttggtggggcgatggtgcatttctggtgtctgacttgcaatgtctggatcctgagtataagctcggcaagcatttaggtttgggcctgaattttgtcatttgtaaaactaaaagaaaatagggattccatttgttttgtttgtttgtttgtttgagatggagtattgttcttgttgcccaggctggagtgcaatggtgcgatctcagctcactgcaacctctgcctcccaggttcaagcgattctcctgcctcagcctcctgagtagctgggattacaggtacgggccaccaagcccgcgtaatttttgtatttttggcagagacggggtttcaccgtattggtcaggctggtctcaaactcctgacctcctgatcctgcccgtctgcctcccaaagtgctgggattacaggcataagccaaggattccatttggatacgcttctgcaagtaatttcccttccttctcatcatctttgggttctgatggattctgtaactagtgggtagcttttttttttttttttttaagactgagtcttgctctgttgcccaggctggagtgcaatggcgtgatctctgctcactgcaacctctgcctcccaggcgcctgccaccatacctggctaatttttgtatttttagtggaggcagggtttcaccacattggccaggctggtctcgaactcctgacctcaggtgatccaccttcctcggcctcccaaagtgcggggattacaggcgtgagccaccgcacctggccacagtgtatctttttgttattgtattaggttggtgcaaaagtaatcgcggtttataattatgcttccttaagctaaaaacttaggtgagaacacacctcagtccttttagcaatcctcagttgagtctgaccatgcacattcttacttacaagttttagttgtctgagccaccgcttagcttggtttttagttgcatggctgccaaagaattgtttagccagaggccctgcgcaggtctgcagggaaacagaacaaaacacattgctcttgtttacgtcctcgggctgaaccacccatttctctgtagcagtcaggatttcctcaggaagctttccttggggagggtggaccagggtgaagcaggatgtgatgacacgcagccctcctgccctctgcagccagctgaggtgaagcctctatctgtatctggcctatgcttcctagtctgtgagttacaagtccaggtcttctgccccaggttggggtgatggagttggtggggatggacggagctgctgcccccatccccctggctccttacttccatttcattttcttatctgcagtgctggggtgaaaagcccaggagggggacacccctcggaggcctcgagtgcctgggtggcagcggctgtgccagcatttcagtcacagcttttcccatggggcctgtgggtggagtcgttcagggctgcggggtctaccgcaagcccagcctcaggaagaaataatggagtggaggatgtggcaatttggcctggccaagcacccagccatatgtttcctcaattcaggttaagtgaattattcaactgtacactgtaggcatctcaggagtactgttaactaaccctaagttttattttaaaatattatggggtggggattactttctgtggaaggcctcagtagatggctttatagtttaaataagcagtaaggttagcttaagcttgttgtgtgcccaactgcagtgagcccgtacttctgtggtggtgaaggcagattttggagtagacaggaatggatttgaagccaggatctgctctcttttttctttttttgttttttagacagagtctgttgcccaggttggaatgcagtggcacgatctcgactcactgtaacctctgcctcccaggttcaagtgattctcctgcctcagccccctgagtagctgggattacaggcgcaagccaccacactcagctaatttttgtgtttttagtagagacgggttttcaccatgttggccaggctggtctcaaactcctgacctcaagtgatccacctgcctcagcctcccaaagtgttgggattacgggtgtgagccactgctcccagctaggaccagctctttgttagccatgtggcagtggacatggaaccttcctgctttgatgtcctcattggtgttgtgcattaattgaaatgatgtacaagaataccgacaatgtagtataggtatacagatgctcaataaatggaaattttccccttaattctcatccttccaacctcccccacatgcgcgcgcacgcgcgcgcacacacacacacacacacacacacggggttctatttgttgtctgatatagatacaagaatcttcctgggctctgaatccacaaatatcaggaagtcaatagaaggcatttagcttgttttacaaacttgatcaaatggaacaaaaacaaataattttcaaggcattcatatgatgtgggaagttgcatgctgtctcttactctggaagatacggatccattcacttgtggagcttttagtaaatgcctgccttgtgcaacattgtggtggagctgcaaagagttatgaaggaaacagacacgtgcattggcctggcagagctgtacgtgttggggagagtacctggatgtgcttaagtgaaacaactagaaatcatcagcgtgtgcaaggtagagagactggctgcttgttccaggaatgcagcacagagggagaatctgtctttagtggcacagcctgctatgagaggggaaaaggctgttttggaagctgggtttgtcatgagtctctgggacttctgcagactgttttcatctgtagtcacatctgcttcacatgttgaaactgtttctactcaggcaaaggtgatttcattatgatgcaggaaagttttttgaagatagtttaagagttggtcatcatagtctattaaaatgataagcaacagtggccattgttaatgataagagtaatcgttatggagttctgggtatcagacactgttctgagtgttctacatggattatgtctttatttggcagcaatgcaaataatacctgaggcagatacctctctccaagacacaaaaaaaatttaataactttcttaaggtcagagcctagcatcttaaccactctaccatactggctgttccctttccatgacaaaaaaacccaacctggccggacgtggtgactcatgcctgcgatcctggcactttgggaggccaagacgggtggatcatttgaggtcaggagtttgagaccagcctggccagcatggcgaaaccccatctctactaaaaatacaaaaattagctgggtgtggtggtgtgtgcttgtaatcccagctactcaggaggctgaggcatgagattcgcttgaaccggagaggcagaggctgcaatgagccgagatcatgccactgcactccagtctgagcaacacagcgagattgtctcaaaaaaaagaaaaacaaaaaaaaaaaaaaaaaaaaggaaagaaaaacccaacccaaaccagcaaaaacaaaaatccaaccacctcctcaaaaaaaattctcaaaatagataatttgttaataacaaatagcatttttctcttttgtaagtggaaggcagaggtgaggaaggatagaaggatagatcaagtgaaagtgacctttcgaatgtccctgtctacacaaagtattctgtggccttttaagtctatctgtacatcttttattaaaaaacaaattgtgatatatagacaaaacccaagacaactctaaaaaacaagtaggtaattaactatcactggagatttaaagatggttggcaagatttggaatcaggaggaaatttacacagaactggtgtgtggaaagttttgaaatactggtcccagcatctagtccttgagtcatccctatgttaacacactaggttgaaatatctcaatttcaggtttttccttttcttgtctcttaacagtgccatcttggttttctcctattaaattctctctttgctttggagtctcatgctttttcaaaaatatattctgacctggccaggtgcggtggctcacgcctgtaatcccagcactttgggaagccaaggtgggcagatcacgaggtcaggagatcgagaccatcctggctaacacagtgaaaccctgtgtctactaaaaatacaaaaaactagctgggcgtggtgacgggcgcctgtagtcccagctactcgggaggctgaggcaggagaatgaagtgaacccgggaggcggagcttgcagtgagccgagatcacaccactgtacttcagcctgggcaactgagtgagactctgtctcaaaaaaacaaaagacaaaacaaaaaaaccctacaaaaatatattctgacctaataagggtctcattttttcaaaaatatgtactgactttataaggtattctcaaatgaggactaatacatgttttttatgtaagaagtgaaacgctgtcatgaaaacacaattggtgaaggatcttacccagtgccttgtgcttactgtcattctcttggcgatctccttgaatgttgctgtgagaataccagcctcacagaagtgtgtttcaggagtggccaatctcccttccctcctccatgttttaccttctaaggtctttgttgccacagaggaggatggggagagaagagaccaatgtcactgggctaatatttaagagaaaatgaagttaagttgaaattaactgactgatctctttttgggcattttctgaattatatctatggagcacctagttggctattcttttttttttttatccaggctggagtgcagtggcgcaatctcagctcactgcaacctctgcctcctaggttcaagtgattctcctgcctcagcctcctgagtagctgggattacaggcacccgccagtacacctagctaaatttttttttttttttgtatttttagtagagatgggatttcatcatgttggccaggctgatctcaaactccagacctcaggtgatccacctgccttggcttcccaaagtgttgggattacaggcgtgagccactgtgctcagctgccttgttggctcttctgcagtttagcatgagagtcatgtcaggtccccactgccactcttgtctgtagggaggtgggtacagatctgacttgagtttaggtcagagccaggatgtcctctgggttcatggtggtcctaaataaggaaaggcagagtgggggcagggaacctcctgcactcaggcccctccatgcacctgcctccccgtgacccaggaggatggtgaagtacctgccagttcttggaggacagttaattctaatggcctactgagaatctttgtttcctgtatttgtggcctgagtttgctcctggaggtcataggccttattctgggatgtttactatcagaaccatttcccccagtagtagttattcacttacaaattgcaaaaaattatccagagttctcaatgtagatcatttatgacctggctatgcaaaatgcctggaaaaggtcttcactcatttttataaaatgggataatgcaaacacttattttctgattatgtaaaattgtttagattgcagttacataaggaagcacagtaccaccctcccatgaatccagaaacactagcatgtaaaaacctgtttttgctgccacgctctttccctttcagacttacactagagctagttctttataaggcttgtttatggaatgaaataattttcctttggtagtggctgttttgcaatattatgctcctacattttactttctcacatatataaaactaataaactacataaacatagacgtgccagatgttagaactgacgcctcttaggagtttgtttttaataagcttatgtaattaacaccttgaactgtattccatttgtttcttttgaaatcatacaaagagaacaggatgatatacatgcataaggcaccagcatagtgccttattggctttaaaaattataatgaagtcatggatgttttacaagttaaaacttgctagttacttttaaggtctgaggactgaaaagtagatatgctacttagaagggaaaaaaattaaagcataaagcaatatataaattgtttatattcatctccccaagggcctgagcttagtgcctggcaaggtgcatgttgattgattgtttcatttattccatttgttcgttcattcattcattcattcattcattcagtgcatttatattgagagcctgctagatactgtcctaagcacaaaaaagaaaacttagaaaaatctttgccctcctggacttgacaccttagttaggggagggaaacaatgaaaacctacacaaataatatccaaactatttcagatggtgaaaaaatggtaagaagaaatataaggggccgggcacggtggctcactcctgtaatcccagcactttgggaggacgaggtgggcagatcacctgaggtcaggagttcgagaccagcctcaacatggagaaaccctgtctctactaaaaatataaaattaaccaggcatggtggtgcatgcctgtaatcccagctactcgggaggctgaggcaggagaattgcttgaacctgggaggcagaggttgtggtgagccaagattgcgccattgcactccagcctgggcaacaagagcgaaactccgtctcaaaaaaaaagaagaaatataaggcagaggcaatgtggacaggtcagggagctgcaattttagacatgatattcttgagaagagggtatttgagtaatatccgcagaggatgagggtaggtaattgtgggaagagctgagcaggccgagagaggagcaagttcaaaggcctggccaaggtggagtggctctggtgtgttggaggagtagcaaggtggccagtgtggctggggcagtgaggctgggagaggcacacattgaagcaggaaagatgtaggggtgtatagttgtgaggagccttctgtgtcatcctgggggctgtggccttttctctgaaagaaacaggagcccgagtaaggtttctgagcagagggacatgatctgacttagtctccaacaggatagcaggatctttccaactgttgtgtttagagggtgcttgagggtacagtggggagcccagaatttgatttcccagtataaaatacagctgaactgggctgggcgcagtggctcacacctgtaatcccagcactttgggaggccaaggtgggggggatcacttgaggtcaggagttcgagaccagcctggccaacatggtgaaaccccatctccactaaaaatacaaaaaaattagttgagcatgatggtgtgcacctgtaatcgcagctgcctgggtggctgaggcaggagaattgcttgaacctgggagacggaggttgcactaagctgagatggtgctgttgtactctgcactccagcctgggtgacagagtgagactccgtctcaaaaacaacaacaaggacaacaacaaaaaacagttgaactgctgtgctctgagaatggaaacacacggtccatcctgacagaatcaactaggcgtcttgacagtacattgaattttttgcaggctttcttcccataatgtgtcaaacaattaaaataaaaatacttgtatccacatcccagagaagaaagtgaaattacccctttttatagggcaatcgagaagcataaacaagtttgggtaggtgataggcatgccttaactagttcatttccttttaagggattgtttcattgtaaatccaggaatatgaatgggaaggaggggagtaggaatgtccaagcaaacattgaccagtaaaactgttagccaagatgaactgataaaaatgttaattcttcaatgaaatgaattgctctttcaaaaaattatgtattagatgtcagtgaaaaagccagtggtgatgttaataaattctcaccttgtaagcaaactgagaaaatgggtattttcattctcacagtaactgggttaggagaatgatgtgaattcgttgcagcttttttagttctcttaggcagaaatgactgtcaagtttacattgtaaccctgtgtagaatgtgacacaaagcaaataatctccactctcactcttaacttccaagatattgttcttttcaaacttaaattttattgtgtgtatttgaggtttacagcattttttttgggggggggggagatggagtctcactcttgtcacccaggctggagtgcagtggtgcgatctcagctcactgcaacctccgtcttctgggttcaagcgatctcctgcctcagcctcctgagtacctgggattacaggtgcttgccaccatgcatggctaatttttgtatttttagtagagacggggtttcgccatgttggccaggctggcctcgaacacgtggcctcaagtgatctgcctgccttgtcctcccaaagtgctgggattacaggtgcaagccaccacacctggcctttttttgttttttgagacagggtctcactctgtctcaggctggagtgcaatggctcaatgatagctcactgcagcctcaacctcctgggctcaggtcatcctccctcctcagcctcccaaatagctaaaactacaggcatgcaccgccacacacatctaattttttgcatgttttgtagagatagggtttcaccatgttgcccaggctggtctcgaactcctgagctcaaatgatccacccgcctcagcctcccaaagtgctggaattacaggcatgagccaccacacctggccacaacatgatgttgtgggatacacagagacatagagatacatttagacagtctagtgaagaggttaacacacctattatctcacatagttaacttttttttttttttgtggtgacaagaacagctaaaatctacttacttaacagaaatccctaacggaagacaatttcattaacttccaagatgttttaaatctacgaataagaacagattcatgtgcttcagatgctttttcagagtactttcacattattttcttggcaaaagtaaaagccttttatgatgaaaattgagatcatcttgaggggaaatgatgtagttaggaaataacttttcttccccacaaaacggaaatgaaagtatggccatgatgtcatatgtaatattttatatagttacctggatagatgggcagatgcatagatatggatacagataatacacatgtgccggaacaagaaaagttcctttgtaggactgacattctctaaatcggatttttcctgtatattacagatcagagtgtggtataggatgaacgcaacagagttcccctatacctgacattcacaagctggcctctgagtccctgaatggcatccttagtgcactgagctgtgtggtgtgattggcctggagttcaaggagccatcagaagggtagatgccagaagctaactcatgcactgtacttggagagggctaggtgtgttgtgaagagttttttggggattgcatggcatttttccagacagtgggggtaaactggtttctttctgattttgtttttgatttgagacagtcttgctctgtcacccaggctggagtgcagtggtacaatctccaacctcactgcaacccctgccttctggattcaagcaatcctcccacctcagcctcccaagtagctaggattacaggcgtgtgccaccatgcctagctaatttttttgtatttttactagagatggggtttcaccatgttggccaggctggtcttgaactcctgacctcaagtgattcatccacctgggcctcccaaagtgctgggattagaggagtgagccacagtgcctcctgcgtctttctgactttggaaagacactatccaactggtgtcatatgaatgaagggctctaaaatagtttctagtaaatagaaacaaacaggttttcctttagcttctgggtggggcttattgtaagcgctcatcaccacaaaaggaatatatgcatgttttccgtggctacagcattgctcttgtatttgttttcttacaacacccgaaccaggccatatatggtgcctcatgcctgtaatcctagcactttgggaggctgaggcaagagcatcacattgagcccaggagttcaagaccaccttgggcaacatggtgaaactcccatctctacaaaaaatacaaaaaattagctgggcctggtggcgtgacctgtagtcccagctactcgggaggctgccttaggagggaggatcacttgagcccaggaattcgaggttacagtgaacggtggttgcagcactgcattccagcctgggtgacagaatgagatcctgtttttaaaaacaaaagatgaaactcggccgggcgcggtggctcacgcctgtaatcccagcactttgggaggccgaggcgggcggatcacgaggtcaggagatcgagaccatcccggctaaaacggtgaaaccccgtctctactaaaaatacaaaaaattagccgggcgtagtggcgggcgcctgtagtcccagctacttgggaggctgaggcaggagaatggcgtgaacccgggaggcggagcttgcagtgagccgagatcccgccactgcactccagcctgggcgacagagcgagactccgtctcaaaaaaaaaaaaaacaaaaaaaaaacaaaaaaaaaacaaaacaaacaaacaaacaaaaaaaaacacaaaagatgaaactcaaacctgtggagggaaccagtggcattcctcctggtctccctgatggtagtaaaatgctgaggattttctggataagctccttgtgtattcagtgcccttctagatgggctatctttattttaaaatcttagttgctttttttctgtcaggatatgagaagattgtgagactttaattaagcccattgaacccaggaactttccatttattccttttggtgtgggaaatatctttggattcaggaagatctttgactctcaacatgttaaaaattatcagcaataaatgtaaataattagaaatcaataattcctgtactctgatttaggaggcttggtttcttgtcttttgggacaagtcactcaaaaccctgtggtctttggttactcttaattcatctttgaaataaagttatcaaatgagatcatatttaaggcccttccctgtattgaaattctagatctttatttttataataggttggaattctgtgccactcatgtgatataacttggtcccatcaaataataggagaaattttaaccttcctgttggaggagtgaggacttctatttcatgagtgcttattgaatgccagatgatctgtcaagggtttacaagtattttatttaatcctattacagcctgtggggtagctttgtaattaccattttacagatgaggaaaatgaggccgtacacatttaactaccttactctgggtcagtaagtagcagagaaagagagaagggttcagatgccaaacttcctgttccattgactggagttctctgtcacccacaatttttttttttttttttgacggagttttgctcttgtcacccaggctggagtgcagtggcgcaatcttggctcactgcaacctcagcctaccaggttcaagagattctcctgcctcagcctccggagtagctgggattacaggcatgcgccaccatgcctggctaatttttttgtattttcagtaaaggcggggtttcaccatgttggccaggctagtctcaaactcccaacttcaggtgatccacccgcctcagcctcccagagtcctgggattacaggcatgagccactgagcccggccacaatttttttttttttttgagacagggtctcactctgtcgcccaggctggagtgcagtggcacgatgttggctcactgcagcctctgcctccctggcttaattgaacctcccacctcagcttcctgagtagctggggccgcaggcgtgtgccatcatgccccgctaatttttatatatttttcttggtagaactggggtttgaccacgatgctcaggttggtctcaaactcctgggctcaagtgatccgcctgccttaaagtgctgtgattatcagcgtgagccaccgtgcctggttgataattctttctcatgtaggccacccttattctgtgaagcttttctcttcctgttgggctgtggccatacctgtaaagaggaataacatcccagtgggtttagatcttgtcttcactgttcagcctcttccatgacagaggtgggactgggtctgctgtcaaggatcacagaggcagacaccatgctaatggttcactttattggtgtcagcagcattaagattcacagctggacaaaaatataatgaaacagagctggccaagggctggatgagcttctaggattatatccccatttgttagtttggtttttctagctggtgagggacaaggcactatcaattcacaggtgccaactgtatgttctgttgagaggtttttgtgtgggtgcaaagttaatgaaatcagggtcacagttttcaaaatctctgtggtttggttttcattgaagtgtatgacagcgagtttcgtactttatttaaagcaaagtgcatgccctctatattcctgcttaaatatctatggctattgaattcatgaggaatcaccaaacctgggtttcttcctgtctctccagtcccctgtcctgccacacctctgcattctgaccttttagtcacccagggtagctttacctcttggaacatgttaagctctctctctggactcagaggaattacatttgatattccctctgtatggaacttcttcctacccccttccctcagatcttcgtttgttattgtttctaatgatatatttcatgtatcaatgtctcattagactgtattactcttgtgaggtcagtagggacaagaatcgtgactagaagctcaccattatatataaaaatgctggtttagcgggcagtctgtcaattcctagttaccgagtgaattttatggcactctcaggaaagagagggatcaactttactgccatccatccatcaatccatccatccatccatccatccatctgttcattcatttgataagtatttattacgtaactgctaagtgttgggtgttgcaataatgttagatattgaggttataaaaatgaataagatccattcccagttttcataaactctaaagttgcctggtaacaacaaacacgtaaacaaataagtcaccttttaaaaactccttacagtgggaaatttcagatgtataccaagtggggagcatatgttaaagagctgccatgttccatcaccgctgatcttgttccatctatatctgcactcaccacccctcccaggcccaggattttaaagcaagtcctggatatcgtgtgcagccatttgtgagatgcggaacgtaggtgccacacaaagagtatttttcagttgttacctgtcagttcttaaaaatgtggagttttggcaatagcaccaagaaacagttgcttcaaccttagctgtataaaagcagagggttaccagcgtcatgcctgttgtcagtcagttttgattgagttgtctggactcctgcgtctcacttaccagttgcgccggggagctgtgtgaggaaatcagccagagtcaagctcagtctcataccacagacggtcacaccgcgaggctctctagtcaagctgtggcagattataatttttctaaaacacaaaaactcaaatattgtacatcatttaaccatagtactagaaatttcagattgttctgagatcaatattttcatttctaaaattctggtcatatcacattcagatcttgttggtcaaatgcttgaaaatgttcacagcctcacgtttgtgtgccaaaaaggcggccagagaaaacccagtgtgattcatgctcatcaagatctgtgaatgtggtctataattgtgacttcattcccacccaattatctgtgctgcttttcaaatctgtgattctgttaagctcagggcagattaaaaatggaaaatgagttcagtctaaaactgccatctgctaaatccaaatgtccattttgagtctgaatctaggcttgtactttctaaaaaccaatgatcaatgttcccattcttttctccacattttcaagttcttagggtttttgtgtaatactcttttgagccactgatagccagcagattggatttttcagagcctttcgttccaaagagatctaatattaagcacacagcttagtaaatcccttcaacaagttctcatgacttaaccgtatgactgcattaaaataaactaatggccacactttgctcttctgtgcagtagaaataaacattcatgttttttgattttatattggatacttaatacctagcacaacactcggaatatagtagatgtttagtaaatattatttgaattaatgaaatatcctgtgaactgttgatgattgaagggcataaacacaggcgaatgttgacagctttcctcagtttcttcatcatacgtgaaaatcactgtgctgtgcagaggtgctagcatatactccgcatgagggatgtggagtaggccttcttcgtcatctcttttattagagctgctcctctgcctggccaggaaactgagtttgttcatatttagactaaacttttcagatttcttcccagtaggtagttggggatgactagttcatgcataagattttggtaataacatttttgctaccagtctcaagcctgccgaatcctagggtcaagcaggctgcactgggcctgttggaagtagaggagagggaaagtgtttctgccgcgactttaactctgtcctaccacagatgacatttccccaagggagcagggagtgtaagaagagaaaaatgcagaggaccttggggaatcattgcatgtaagggtgtgctgaggaggaggggtggatggtgacagggaaactcacaggcagtggggttctaaaatagagacagtgtgggcccccatggctgttgcctaggaagcgaactccatcagtgcctttcttgctttcttttttttttttttttttttttttttgagacagagtcttgctttgctgcccaggctggagtgcagtggcgcaataatcttggctcactgcagcctctacctcctgggctcaagtgattctctcgcctcagcttcctgagtagctgggattacaggcatgcaccaccacgcccagctaagttttgtaatttttttagtagagatgaggtttcaccattttggttggccaggctggtctcaaactcctgacctcaagtgattcacccacctctgcctccccaaagtgctggaattacaggtgtgagccactgtgcccagcctcttctgtgctcttctaatatgctatgtgatatcctttaaacaaatgcaagtctcaaatgtttaaatttatccaaagactctgtgggggattgtactgcgttcaccctttctggtatggttctgggttagcgacctttacaaaagacaccttgtgtgagatttgggagctggaagtgaatcagcagcatatttttttgactctgaaggttggtgtaggatgccaggcattgtggcagcttccacatggtgtcactgatctgctggcttaccttgctggcatgagacagcatctgaacccacaacagctccagagcccgccagatctccgccttctgtgtcctcggccatgtgtgcaggtccattgtgaagagtgtgacggtctcgctctgtcacccaggctggagtgcgatggtgccatcttggctcactgcaacctccgcctcctgggttcaagtgattctccagcctcagcctcctgagtagctgggattacaggcacccaccaccacgcctggctaatttttgtatttttagtagagacggagtttctccatgttggtcaggctggtctcgaattcccgacctcaggtgatccacctgccttggccttccaaagtgctgggattacaggcatgagccaccgtgcctggccccccaattttttttcctgctatttttttccttagacatttggagacctagaagcaggtgctgagagagctctgaggaggagggtttgtcaatcctgccttctgggaggccgtttattcttcaggaggggatctgtggtaaccgggatccacctgtgcgcaatagcatcaccatgaccgtatatgccaaagccaggatttgacatgggtgctggcaggttttgggtgtttttggagagaggggatggaaggtatgaaataagcctcactccagccacctgccctatgggtgtgcccctgggggcttcacttgccatttgcatgacctaatacgtccctctggcatatgtcgttacacgttaaaactttttcctgagacaaagtatacttccagctcaacccatctgtagaaacactgggagtgatacctcagaaaagtatttgagattagttattacagtcagtgaatgtctgcagaacgacgacgacgtggcaggaagtgatgacagagctggtgagaacagtaacattacagggattcaatgaggccgaacaagaaaacgagaattaaagacatttttatggttgtagcaatttcacctgaaaggttgctaaaagtgtttatcaccttaaaaatctttaaacaagctaattaagggtgaaaacaccttgggaagtcattcaaaaaatcagttaggtttcattgtaccatagtgatttctttttttaatggatttagcttagaggggatgtatatatctccatccatccctcttcaaacaaggagcaatgtaaatataacagaatttatgttatataaaaatatatgtacttattattaaggacggaaaaggtaaagaaacaataaaggagtcagcagtctgtctttctctcaactttggggagttagagcaacacacatgagttttcccttggggaaaactttatagatacataaaataggaggatcacacattcgtttgcatacaatctgcatgcaacagatcacattgtatctcctgatgttttcagatgcttttttttctttttatttttttcctctcctgaatctgtcaacttattctaaactggaagtgacatctggggaaagaagcgcagaaataacaaaagtaacgatacaaatgccttttgttttcctagtagttttaggttttccattttccagagacagaagtgaattgggataaatctcagaaatactgtgaaaccgattgttgaggaaacagtgctctgtgtcttttctccttaattgcaacagcagtccacccaatctgaactgctcggtacaatgccccttatctctgtatttttatgttggttgtatgaaagacgggtgtttgggacaaagatgctctgtggctttgggggaagattatacaagtttgttgtccgttgagctgacacgggtgatgactccacagatttaatttaaatcttcagcaagtgaaatggattgtcatacatatggacagatgctgtgaccaggttctatgagaagaaaaggaaagagaacttgaatctgcatgtatctcttttcctgttttcaaagacaggggtgggaaaattcttataaaaagatcgcgtgactcaaaatttcacaattttctcaaaaaattattttgaggaaataacgttttcccatgttcctaaacttgaactaatattgcttaagtttaatgccagagaaccaaagagggaaaataagaaagaagtgaaacagatgaggcaagcaataaactccagaccagaaacttttgaacaccttaaaagaaaaggtttaaaaaagaatccgtttcagtgttttaatcatgatatttattataataaatgtagagatgattttaagtcttattatagttacaagtttattttgcaacatcagtgcttgacattagtatggtggggtgttgagtcagacgtagattttgtgtttccgtaaagatggcagcatgcgatcctatggaaacctcatctacattatttaaatttcctgcagactcatgttgcaagtatttttagtaaaattaaatatttttatggagtaggtctgtagctatctcaaggaataagctgaataaaaataatgcaaacactgtcagtcctgaaagagcatggctttttaaaaactgctttattgaggtatgcttgataagtgaaaagctgtgcattttgaatgtatacaattcgatgagtttgggaataagtatatgccataccatcaacatcataaacatatccatcattcccagagtttcctcccacccccatataacatagaaatgatgattattcttattatttcattttttaaagcctgaattttgagtgggtaaagataatcatcaggtagttggttggtttcattgattggaatgtaaaagattctttttgtgggatggcagacaagacccactcttaaaaacacacatatacattcttctattctgttgcctttcttggcatttaaatcatcaggactgatgaaagtggtaattatggggacttactgcacatctggaaagtaatttgggaagatgtaaaagcagctgtgccacccttttctaattattatctggagtgaggagtggctattatggcatgttgtagggtgtgaaatgctggctttctttggcctgagttgatttgaacagctgctcttttcctcaggagcaacaaatatatttttcaggtccccaagttattgggggagttttgagtgattgggaatgggatagagaatttcactcgtaggaaaaacagaactgaagtgaagagttggcttgttgttggttttatgatattgtgaaatacatatttggtcttaatcttgttttccggcaaactcctaaaacccttggaacctccaaagtgataagtgtatttttttgtatgttaatgagttgactgatggctggccactctaggtagcttcagaatggaagctggtcacaggaaagacccgggctggattagagggttgggacatttagccccacctcccaacctctggggaggggagaggggctgaaggttgagctgatagtcattggcctttgatttaatcaatcatgcctgcataatgaagcttccataaaaaccccaaaagactgggttctgggagcttctggatagctgaacacatagaaatttgtgtagggtggagcatctggaaagggcacggaagctccgacacccttcctcaatactctgccttgtgcatctcttcatctggtattcattggtatcctttgtgaattctttcaaaataagtcagtaaatgtaagtatagtgtttccccaagttttccgagccactctagcaaattaattgagccccaaaagggggtcgtgggaaccctaatttgtagcaggtaaaacaacctggagcttgcttctggcatcagaagtgaagagcagtcttgtgggactgagccttcagcctttgggttatgaggctgtctctggttcggtagtgtcggatttgaactggaaaacacccagctagtgtccactgcagaacttgctgcttctttggagtgtggagggaggggaaccacctcccctgcccaaccatgtctggtgtcagaagtgatctctgttgtgaggctgtagaagacattgagtttggtttttctacatcatcagaatattcttaggatatatgagagagaagagaaaaaggggaagaaagtagtttggacaaagctatattaataattacataaataatatataaatagtttttttcccagtggtcttggttagtccaagacgacggttggttgtgataagttggacagttcacaaacgtgaaagctggttgttttagagagaaaccagtattccatgttggaatacctcagtgtggacctctgtgtataagagacagagagagtgatggatttctattccagaccagaaagccacagggtagtgtgtaagctgtaaacccccttaacaagtacacttggctgttgggagacatggactttctatttggtcaaagtggcaggtgtgttttgtttcctggctggatgaaggcagaagtttctggatgaggacagcatcacgttcctgagaccaagacaactccaaagagcccaggatcttccagggtccccggttgtgatagggatcagatctgtaactcataaaaatgggctttcaggttaagttgctcccctttgccctcaaactcacacacaaaagggagctcctttgtctttgtcaatataggctggggaaaggagctaagaaactaggagaggcttcagggtgaacagggatggtgagcactttgtttctttgaagtatcagcaaacaaacatccctaggtgaatcaaggaggatgccctggtgctgaagatagcccagctccctctgtcctgggaactacctgggtgcttgcttgctttctctctctctttctttcttgctttctccctctctttctttcttgctttctccctctgtctctctctctctctctctccttcctttctttcttttctttttttttttttttttgaggtgtaattttgctctcgttgcccaggctagagtgcagtggcgcaatctcggctcactgcagcctccgccttctggtttcaagcaattctcctgcctcaggctccaaagtagctgggactacaggcacccaccagcaagcccagctaatttttttgtatttttagtagagacggggtttcaccatgttggtcaggctggtctcgaactgctgacctcatgatccacctgcctcccaaagtgctgggattacaggcgtgagccaccgcacccggccctcctttcttttcttttccttttttcttctcttctcttcccttttcttctcttttctcttctcttctcttcccttcccttctctcttctctctctttctttttccttctttctttctttcttctttctttcttttcttttcctttctttcttttctctttctttctttctttctttctttctttctttctttctttctttctttctttctttctttctttctttctttctttctttctttctttctttctttctttctttctttctttctttctttctttcggcatccttagtaaattatttcttttctttccattctttcttttcttttctttctttctttgacggagtttcactctgctgccctggccaggttggagagcaatagtgcgatctctgcttactgcaacctttgcctcccaggctcaggtgattctcctgcttcagcctcctgagtagctgggattacaggtgcccactaatgcgccctgctaatttttttttttttttttttttttttttgagacagggtttcactcttgttgcccaggctggagtgcaatggcacaatcctggctcaccgcaacctctgactcccgggttcaagtgattctcctgcctcagcctcctgagtagctgggattacaggcatgcaccaccatgcccagctaattttgtatttttagtagagacggggtttctccatgttggtgaggctggtctcgaactcctgaccgcaggtgatccgcccacctcagcctcccaaagtgctgggattacaggcgtgagcccctgcgcccggcccaggttctgttttcaggcagtttcctttcctggaggcagcacagcagaggccaggaggctgagggccacggtgcatgtcctcagaggggcagcaacagattctatcttgacctttgttatttttctactggacacttgacaatagacgacattttgaagaggagggggtctcccacgttgcctgctgtgtcagtccaggctgtgggctcagacagacaagactgattgtagtgaaggggtgacttttgtccagacacattcaaagatcttactggccttagaagagtccttcttgtctccacactgtgctaggaactttgaggcaatcagctcaaatgcagaacatgttattggtggggaagcaaggagcttttctgaagcgtcatttttttcccgtctctgtttctcctctcccttggttctgtaaaatcagtgaatgcagaagtagggtagagatgatccttgctctgccccaggcctgctgaccagggtgtaggtctttagcagaaaggctttgggagaaattcaactcccaagccctgcttgcatctaagcctgcttcgcagtgttaggcgtgtgttgctatgggcagtgcaccaacattaaataactgaaggggttggctagcagtctgtaaaatggaaaatgtgtgtgtggctttaggtggtctaaaagtcgtattttccttggttgtcttggtaaagtcatttatttataccaaagagcagaatgttgggaggttaaaaaaaaaaaaaagagctggaggagaggagaggtctttctgaatgaattgatagaagaaatggcataacttacaaatgtacaaggtatttctgtcatcctccctgtatgtattcaggtatgtttttaggaatccattgctctaaaggaagactatagtgtggaacataatcttgcagtgagtattacactgcgagaaatttttagcatttactacatgccgggtggactacacgagccggctaaagtctaagcgcttcacacgtgttactccagtagtcctcactgaagtaggtgttgtgattattcagtgttcctcagaggttgagacgtgcctaaggccacttaaccaataccaggcgctatggagctgggtggaaactcagaatgagctctagagcaattacgtggcacttgccttggggaagaaacaagtgacatgtttatttatttatgcaggtgaatttgtaacatgtactcttgcacctggacttggaatgcctagtgaataatgagtctaatgaataatatgaatattaatgaccataataatgaatattaatgaacactaatgactaaatgaataaaaagattttccacttttctgagggtctcctgagaggtgcagtgagatttgtcccagatgcaattctctatcggttcctgaattctcaggctcccatcagaatccctgggaggggtcctgacatctcttttatgagcttcccagtaggtggtggtgcagtccaggggccacattgggcattaggagcctcttcctcacacagtgcctttgctgaaggtgcttccctggtgtttcctctcttagccctgctaggcaggcagagagatggggattgaagactttggtgttggcaccagaccgtccgaggttggagagctggcctctgtgcttcttagtcctgggatttgtgggcagtcgctcaacttctttgagctcctgtttacccatcaatataagtgggaaaaaacaggcccctgtcagagggctgtcctgagggttaggagatcctgcatgtaaaacaacctggcacttgatgtttcccacttaaataccaacctttattactattaactctgcgtagagggaggtccgatggctgtgggcttttccagggtggactgacctgaccgcctttgtttgtccaccccttcaggacggttcactgggaaacatcgatgacctggcgcagcagtatgcagattattacaacacctgtttctccgacgtgtgcgagaggatggaggagctgcggaaacggcgggtttcccaggacctggaagtggtgagtgggggtcctgggaatatgcttctgtgagcagagctgctccaatttgggcttttccttggtctttatcccagtgctagctcttcctggggtatcaatctgtaggctgctgcactagtgtggggtagaatgttcaggtccctaaaagactggcccagttctgccgcagatatcaaactgagtgagtgttggctggagcaataggatcgaacctttgcactcattaaaagaacagatttggccgggcgctgtggctcacgcctgtaatcccagcactttgagaggcccaggcgggcggatcacgaggtcaggagatcaagaccatcctcgctaacacggtgaaaccccgtctctactaaaaatagaaaaaaaattagccgggcgtggtgatgggtgcctgtagtcccagctactcgggaggctgaggcaggagactggcgtgaacctgggtggcagagcttgcagtgagccaagatcacgccactgcactccagcctgggcgacagagcaagactccgtctcaaaaaaaaaaaaatagatttttatttttatttttttacttaagggaaaagtatatttttactgttcaccagtgtatactacattttttattgactctaagcccaaagggtgtctaggctaattttttttccagctttcgttccttttttcttttcttctctttttcttttcttcttttggaaagcaacataaaattttaaggaacaataaatcacctgtagtccctcacctagcaataatcacgttggtgttttagcgggtatccttctagtgtttttgtgggcatttaaaaatcagcaaaactagcccaccactaaagacactcttttttttttttttgagacggagtttctctcttgtcccccaggctggagtgcagtggcgtgatctgggctcaccacaacttccacctcccaggttcaagtgattctcctgcctcagcctcccgagtggctgggattacaggcatgcgccaccacacccagctaattttgtatttttagtagagacggggtttctccatgttggtcaggccgatcttgaactcccgacttcaggtgaccacccgcgttggcctcccaaagtgttgggattacaggcgtgagccaccacgtccggcctaaagacacttttataaaaaaaaaaaaaaaaaaaaaaatcagtgatacaatgctgtatctatatatttaaaaaaaacttcttcctttattacttaacattttattgcagctcatattccctgtccttgagacttgtcatcaccatctttcatggttatagtctcctctcactcaggtgcattgaaataaatttggctgtttgtgaaaacctttatgtgtataatcagagatgcatttggacttgtatgtgataaacagtaactaaatagcataggtgctatatatataatttatatgtatactagtagttcaaaattgtatatttgctataaaatatcataaaagcgtctgcatttctcagtttaaatgtcttactattggattcactttagttccgtgcctttcaaatagttttgtttcattatgccaacctcaggacctcctcaagaagtggggttgaggcagaagaaaatgttcaaccctctgtctcctcatccagacctgttccttttgagccatctcatatagtgggggctgcatggatatgttttaagtaacagagttcctctgcctttaaaaaaatgtttgaaaactaagccgggagcggtggctcatgcctgtaatcccagcactttgggagaccgaggctggcagatcacttgaggtcgggagttcgagaccagcctgaccaacacggagaaaccccgtctctactaaaaaaatataaaattagccgggcgtggtggcgcatgcctctaatcccaactactcgggaggctgaggcaggagaatcacttgaaactgggaggcggaggttgtggtgagccgagatcgcgccattgcactccagcctgggcaacaagagtgaaactctgtctcaaaaaaaaaaaaaaaaaaagtttgaaaactgctgattcagttgaatccttatttatcctcctcccacctcctgtttatctacttagggtgagcacacacacaaaaataataattaagtaactaatttagaactaagtaggaacagataattcttttgttaataattatttttatgttacatacaagggttctgtgagtcctctcatacaagggactcagcaagtggttgggtaccactgccctatattgtgcaagtgaacataatctgtttccacggtaagactatggtgttcttatgtactattatttcttttcttaaccaagtaaacattccttggatcaggagtaacattatatcatgactgccaaatattaattgattctctttcttttatgttcaccaatttagtagctgcagggatgggagttagtttaaagttgactgaggctgagaagtgtcatccaggggctgacagccatcaccacgggagcctgacgccttggcccaggtgggcggcagtgttgtcaagggcttctttcttttaactttgttccttgacatgtgtgaatgctggggttatttcctccttttgaagaaagtaactttatgtgtcaaaagactcccacactcttaaaattcattaggctctcctgttgaagcatagttaatgaaaaaatactctcattttggcaagattaccacaggacaacttaaataaatattgcataatgccctgaattcttgaatgtttcaattttttttttttttttttttttgagatggagtttccctcctgttgcccaggctggagtgcagtggtgtgatctcagctcaccgcaacctccacctcctgggttcaactgattctcctgcctcagcctcccgagtagctgggattacaggtgcccaccaccatgcccggctaattttgtatttttttttttttttttttagcagagacagggtttctccatgttggtcaggctggtctcaaactcctgacctcaggtgatctgcccgccttggcctcccaaagtgctgggattacaggcgtaagccaccgcgcctggccagaatgttgcaattcttgcctcaaatgatagtctggtaggactctgtggcctcctcagacattttactgtgcttgaggaaatgattgctgtgaactggcagaagacagaccactgacacaacactaaactgctcttctcaggattctagctggttaggagttggggttaccatcatcatcccatggtgtttgggaactttggaaggcagcttctaggtaggagagaaagtctgcccatcggtgggatttagattattattttgatttattatttagataataaaacctccttctcattcaaacagatggggctaatttggcgtgctctgttccaaaaccgcagaagacagtctggggggagaaaacaccacatgagcttaattagttcccatcaaaggtgcaagaatttggtggtgagtaaaattgatgggagctgattcaagccaggctggaagcatgactgttcattctttaaattgtagttagcaagtaagaccccaaattggcatattcagattctctctctctctttttttttttttttttttttgagacagagttttgctcttgttgcccagggtggagtgcaatgtcatggtctcggctcactgcaacctctgcctcctgggtttaagtagttctcttgcctcatcctcccaagtagctgggattacaggtgcccgctaccacgcctggctaatttttgtatttttagtagagatagggttttaccatgttggctagggtggcctcgaactcccgacctcagatgatcctcccggcttggcctcccaaagtgctgggattacaggcgtgagtcactgcgctcagccttcagattctctttctatgaaattccagacaagttgcagtggaaaagggaaattctaaaactggcaaggatcgggtttaggtgctggatgtttcctgtgtcactcacatggctccaaagtctagatgtccatgttagatgtgttttgaggctagtcatcatttaggctatgatacaacactgttaacctactgaaagttccctctcacagtgcttaacagttttgattcctgatgggaactcatttccttgaaaagctgtgacttccagtctgtcatgttcccttttattgcatcagaattttacatgtatttctaatctttcaattctgccttcagacaagtaaacaatatgccttccctgctggctgcttggttggcacaacttcaggtctgaggacctgcagcttaataatttttttctttctttctctctttctctatctctctctctttctttctttcttttttgagatggagtttcacttttgttgcccaggctggtgtgcattggcgcaatctcagctcaccgcaatttctgcctcctgggttcaagcgattctcttgcattagcctcccgagtagctaggattacaggtgtgtaccacccctcccggctaattttttgtatttagtagagttggggtttcaccatgttggtcaggctggtctcaaactcctgatctcaggtgatctacctgcctcggcctcccaaagagctgggattataggcatgagccactgtgactggccagtttctttctatgtttgtcagcagccctgtcaaagctgagtgcgagatggctttgagatgaaataacctgttaaaagcagaagaggaaatatgcagtaacatattagaagcctcaaacattttataggggaaaagtagcattagatttgttgtatctgctctagaaaaagtcattttagaagacagccttggggacagagaattttgggtgatgggttgaattggtttatggctttgtttcattctaaatcttctgggtgaattttggagattgaagaaatagtctacagataggatacttagatatttgtgtttggctttaaaaagtcaaaaaatgcattgtccttaagagctaattatgtatcaactggagaacaaacgaaacaaaaggacactcagcctacagagttgcttgacttaaccctgaaaaataaaaggttttgataattatgttagtaattaactttctggactggatgtcaagctctttctctaggacttaatcacccggatcctgactggaataatgcatttgataaagtgtctttggggccagttagttttggtgaagacaacagagagtacagatgggtaaaaattcaacaatataaacagagattatgattcacatttataactatggtgagagtttttatttagcaccaaatgggccctacaggaatggtgtgtttggaccacagcctttccctctgctggggattgggacattagtgcttgtgaacagcagggaagttgcccatatctctccacatttggcacaatccctgggcaccatgtgtttttttggctgggagaagctgcaatcagaaatgctagtggctttccaagtccataatggtccaacttgaatgatactaagtctgacatctgtcaaagtgacaccatggtcaggaaagtactcaaggtggcttcttattactggcagtatcagcttcctcagcatcttgaggtggaatctgtgtgggtattggcagaaaacaagtttgtgcagttgttgatgtggcacggagctgacagagaagtccctacccccagcagcactctgttgatgatgacatactcatcagcagctgaagcctggcccagcttctgtgccaatttgttgtcatgactttgtgaatacaaggaaaagggagcccaggtggagatgcactgaggtctttaaggactgggaatgtcaataaaaatattgcatattataactgtgaaaggtcatagcagggccattgctggacgggtgcagtggctcacacctgtaatcccagcactttgggaggccaaggcgggcagatcacttgaggtcaggagttcaagactagcctggctaacatggtgaaactccatctctaccaaaaacacaaaattagccaggtgtggtggtgcgcacctataatcccagctacttgggaggctgagaaaggagaatcgcttgaacccaggaggcgaggttgcagtgagccaagatcatgccgctttactccagcctgggtgccagagtgagactgcatctcagaaaaaaaaaaaaaaaaaaaaaaaaagaaagaaagagaaccattgttaatggtgtaggaatgacttatcattccttgcaattttaataacttaaaccttccaaatatagttctggattaagacagaggcagtaagagtagtgtccattgtaaccagtgctaattgtcagagcctcttttgactgtaccaccccctctccaagctggaggaagagcccttacccgggcttgttgcagtgagcaagagggtgtaagaaacattaatggaaagaggctgagggagtcacagacttggttcaaattctggctcttttacttacctggcaagtgaggtaacctctcctggcctcagtttcccaatttataaaatgggagtaaagtatctcaaagttattagaggcttaaatgaaaaaaattgctgtcatcataagtgactgtaactgttgatttctttccgttcctttctgttctgagttgaaaaatccctgcagtaatgctgaagagtatccattacttgtacttcattaatatttattcaagtgagtgcagggatttttttaatagctttttatgttggaaatgtgaacatctataaagatcataataccgtgaacgtcctgtgcctgtttcccggcgtccacagctagcagcatcctgccattgtttcatcctcacatcccactcacacttcatgattactatgttttttaaaagtttgttttgtcctggcacggtggctcgtgtctgtaatcccagcactttgggaggctgaggcacgtggatcacctgaggtcaggagtttgaaaccagcttgtccaacatggtgaaaccccatctctactaaaaatccaaaaaaaaatttagccaggtgtggtggctggcacctgtagtcccagctacttggaggctgaagcaggagaatcgcttgaacactggaggtggaggttgcagtgagccgagatcgcactattgcactgcagcctgggtgacagagtgagactccgtctcaaaaaaaaaatttgttttgaggtataacttatatacatctaaatgcacaaatgtcagttgtataacttcatcaaataaatatacccacgtcacccgcagcccagcatgatagagaacacattcagcacctgcaaagttgcttcctgtcccttctagtgggtcctgcctggtttgagggcagggatttttgttggtctgttttggtcactactgtacccttgcatagagaacagtgcatggcacataataggtgcccaataagtatttgttgaattcattcatgtgtgtaaatattcaactgagcatttaaatatatttgaaatatttaatgagcattgagtctgtcatgtgggattttgcctttccagaatcacagacaaaatatgtattccctgcccacaaagaggccacagtttagtaggggtgtgaggcaagtaacatactcttaccgtgctgtgcaggagtacagaagagggtccctgatgactccttagaggaagtggtaacccaggcttcccaatcagaaggcacagggaagactgacctggttgagggaggtgtggaccgtggggagtaacttcagggagacgtcacagtttcatccaaggccaaaaatggagggaggggtaaatgtggctagaaactatggtataaacgatgtgaggggaaaaaagaggcaggctgttctttcacaggtccttggattattaatgatataaaagataaagtagaatattccgattcattcctattcacagggcgaaacagaataaattgccattttgcaattgttgaccgctgggccaaggtgaacttgttcttgctttgcctgtggcttcacgcagacatgcgcacatagtccagtctgtgtgggtttttgtttggtttcactgactgctcttttgttatttgctacagacagcaaagcatatgggaaacaggtttcctgttgtacatttgagcttcctgaatattcaagaaaatgatcaggaaagtgagactctgcccagctcagtctacaaggtcaccattgtttttaaggaacacaggtctgcccccagagcatagaaacacagaagacttatgtcgtccctgaattcttattcttatccccataggataagaatgagaactgtgccgcacactatcctgagttatcctgctgaagccccgttgtttctctaaatggcattagtttttgttctgtttccttttgtcttcacttacattatttgctagctttgggctacagctgatttgaagatggtgatcagtatctgtgggcattagatggtgagtctgaactccattctgctgtgggattcacacacttgatgtcaaatacactgaagcattatatcttaagccagatggtaatacagttctgtgctctggcctctctcagacaaagtcacatttgtaatcaaatgccctgttccaatttagtcagcattttttgcacatggcactatgggaacgtggacatcaacagatctcttggtgccagatttgatcttggcattctgtacctttggtaattaagaaggcttttcttttttattaaccctgcagtcagttcaggtgtttccaaccttacacttaggcactagacacctttgcagactgtttgtgcacttgcggaaaccaccgggttggctgtgttgtgcatgacagtctaagagtagagagagcttcagatttttcaaatgtgcatcaacaatttcagcttcttttttttttttttttttttttttttgagtttcactcttgtctgccaggctggggttcagtggcgtgatctcggctcactggaacctccacctcccgggttcaagtgattctcctgcctcagcctctcaagttctcaagtagttgggattgcaggtgcccgccaccacacccagctaatttttgtatttttagtagagatgaggtttcaccatgttggctaggctggtcttgaattcctgacctcaggtgagccacccgcgtcagccccccaaaatgctaggattacagaatttcagcttctttttctcttgctcctgaacatttagaaatggtttttgtttgcttgctttaataaaaagtagtacacctgagggcttaaacaccaaactagcatactacttcaatactagtacttgccaaaaaggaaaaagtctgagctttgttgtttccatttgcatacaacagacagcattcctaaatgttgaggaaattgacactaactggggagaagagttaggaactcaggtaaaagtggccactttgatggcggaacctagcaggtatccagggtttggccagggcttggccagggcttgggagggaaaggagcatccctgtttttggagtcaggaccattcagggggtgaacgaggcccaggccaggtgcctttttggagcctggaatattaaaaccaggatgccaaaattgtagtgtgatctcagtctttacatttaacaattatatacatttttaacatggaagattacagtataatttatttaggctaatcagaagctaattataggctatttaaaaatgttaatttgtagcacactagaggcagtatgatctgaagtgagacaaaatgtaaaggagtgcagtgaatgtttgcttatttccaggccctcagagtgggtttctgtagctggatctatgtcatttagcggtgatgtcaacagtctacatttgagactgtaggagatgactgagtggtccaagccaagtggcccacctattctgcagaaccctgtgtggggcctgaggcagtttggcatctggaatggaattaggcagacacctgcagggcccagcctggtagtcagctgaggcagggccctgagcctatgctggtgttgtcacacactacacctgacattgtcctcctgacgcacgcagtccatattttagactgatctctcaccacagctcctgtacaccgaaatgactaacagtagagagaactgagctctgggctgggcctggtggctcatgcctgtaatcccagcactttgggaggcagaggcaggtggatcctttgagcctaggagtttgagaccagcctgggtaacatggcaaaaccctgtctctacaaaaaaatacaaaaataaacagggcgtggtggcacacacctattgtcccagccactgggaagcctgaagtgggaggatcacttaaacccgggaagttgaggctgcagtgagccatgatagcgccactacactgcagcctgggcgacagagtgagactttgtctgggggaaaaagaaagagaattaagctctgagctgtggatcaccatgtgtatcagtgggaggtttctctcgctccctctcattagaagaccattgcccccattccagcagtatgtttgcatttgggattgtcttttctttcggtttggaagttttaagaattttaagttgaagaaaacaagatggtaaaatgttgagcaaatttgtttggtgttggccaggtgtggtggctcatgactgtaatcccagcactttgggaggccaaggctggtggatcgcttgagtttaggagtttgagactggcctgggcaacatggtgaaatcccacctctaccaaaaacacccagaaaacaaaaacgagctgggaatggtggcgcatgcctgtagtcacagctacttcggaggttaaggtgggaggatggcttgagcttaggaggcagaggttgcagtgagccgagattgcaccactgcaattcagcctgggcaacagaatgagaccctatctcaaaaaaaaaaaaaaaaattgatgcggtcacatcagttatcctgacttttcaactattcaatatcaggaaggacacacactagctcatggggtaactttggaaaatacatctcaatacaccccagagcacagctcatacctttcccttagtgtttcactgcacttctcaaaaaagaaaattaagttgttgcttttttttctcccttgacaggtcaatctgtgtattagaaatggagacttaatttaccaactctagaatggtattaagaatctaagttcaggagtaagccactgctcctgtctctggccattctgagacctgtgcataagtaatttatgtataaggcatagtttgagagactggagcaattatttagaatatgaagacgttctaaatttgtgctacagcaatgtcatccatctcatgggccccagcagaagctgatgaaacttaatcaaaaataaatcaagagcaagtccaaaccaaattggaagcacatcatgaatattcgtgaacatctggatgtgtgtgtgggggggtgtatgtttttttttagtgtgtgcaacagcagagacatgatttcttaacaaagatgccaaaaggaagacagattttcatctgtgatttcaaagggtgtctttgtttgtatgtgtgtgtcctttctccttagggtgtgggtttcttttctccgagatattcctttgatctctttcatctttcgggatctgtttgggtattttatctgaattcttcattggagtcagtcattttgattcatgaagattaaacatttccttctaaaggagaatttcaacttaaggaaagttttactatttaatatttttgatgaatcttttcaatgctagcgatgtgataattatcaattaagctattctgcatcattgatcatcagtttcacttcacatgtctaaacctcagggtacggtactttatctgccttgctacctaaagtactgccaaaaactaaagaggaaaaaacaaagtatgggaaggcggtaataacaaccatgctgataattatcacaaaaatgactttttgtttgtttgtttttttgtttaagagtcttgctctgtcacccaggctggagtgaagtggtgcgatctcagctcactgcaacctctgcctcccgggttaagtgattctcctgcctcagcctcccaagtagctaggattacaggcgtgtaccaccatgccggactttttttgtatttttagtagagacagggttttgtcattttggccaggctggtctcaaacatctgacctcaaatgatccgcctgccttggcctcccaaagtgctgggattacaggggtgagccactgcgaccggccaaaaatgacatttttttttttttggagacagagtctcgctcggtcgcccaggctggaatgcagtggcacgatcttggctcactgcaagctccgcctcccgggttcacaccattccccttcctcctgagtagctgggactacaggcgcccgccaccacgcccggctaattttttctattttttagtagagacagggtttcaccatgttagccaggatggtctagatctcctgacctcgtgatctgcctgtctcggcctcccaaagtgctgggattacaagcgtgagccacagcacccggcccaaaaacgacatttttaaaagcacattagagttgacatagttcctgggtacatgctagagctcaatgaatacttatcatagatattattatttatagtagagatattcattataaagttagcacttgttaaaagttgaacagctagtaagtatcagagatgagatttgaaaccaggaggccaatgccaaatcttccctggccactccctaaccttgcattttcttctctagagtctcctcagagccttctagaagaatcagtttgtgttgacttgatttatagattagtttatgtccttgggtaatatgatatcaaaacgctatattataaagcatgatataatatagaatattaatataagaatatatatatattttaagagatggggtctcactatgttgcctggtctggcctcgaactcttggcctcaagcgatcctcccacctaggcctcccaaagtgctgggattacaggcatgagccactgtgcccagccaaaagtaatttttgctatacaattacaacatacattcattgtaaaaaaattgaataaaaattccacagtagaattgtaacgtctcttaatacccaggtctcaaagataacaattgttaacagctgggtttttgttttgttttgagacaaagtttttgctcttgtcacctaggctggagtgcaatggctcaatcttggctcaccgcaacctcttcctcctgggtgcaagtgattctccctgcctcagcctcctaagtagctgggattccaggtgcctgccaccacccctggctgatttttgtatttttagtagagattgggttttgctatgttggccaggctggtcttgaactcctgaccacaggtgatccacccacctcgacctcccgaagtgctgggattacaggcgtgagccactgcaccccaccttcccatagtgttttttaaaatgagtgttttaattgggatatgattcatataccataatattcacccttttaagtgtacaattcagtgatttttagtacctttattcctaattccaaaattccatagtactttgaatgctgtttcacctttctatagtgagtatgttgtccattactgtatctctatggccagagcaatcccctgaatatagtaggtgacaaataaatttttgtggggtgaatgaatgacaatagctgtgcattctggagatatttgcattcctagactcataaagtgaggctttcttattacactcttgggttttaaaaataagcataaatatttaatgagaaaaatcttttaagcaagaaagttttgaaagtataattctggaaaagaaatgcctttattacagaatgaacctgctggctaataaaaacataaaatatgttaacaagttcagacttctaattagaggaagaaaggctcccaatgaaagtgtatttgataagacaaaagtctttcatgctgtaaagtttgcttatgtaaacctattttttaaatatggttctaagggataggctgttgtcttaaaatgggtatacaaatataaacgtccaggatccactgaggataaactacataaaaaccggtacaatagaaaaaaaaatgtgcttggcacttcagtcctttctaaactgacttactacccacccccagcccagcccatccctgctccgccccaacccccaccacctgccccacccccagcccagcaccaccggcctcccacaccctcactcctgtcccagttccatcccagccctatcgtaccctcatcccaaccccagccccacccccaccacctgccccccaagcccagcctcctgccccagccccaccgttcccctctcccagcccgtgccccaccccagcctcgccctcatcccagtccccagtccccctccaacaccccacccccagccccagcccaggctatggttgctggcctttctgttcatctgatagggaactgtccaagacagcagcaactttttgtgtttttgtttaacacagctgagtgtattgtgtagtcgcaaggagctgcagaatagcagagaggaaaaaataataatgcagtgttggaagcggagtggaaccaagctagctcatcacagtctaggaagagatagttgattctgctcacagggcggcttgactgaaagcttgcagaacttactgctcaaaccggggatactcctgccttctgcctcttgcctctgcttccctcttccttttcctcttcctactccacaccctggacatggggtgattctgtgcctttcttaggcctgtctcctagctgtgcccacctaagcatccccttctgcttgtgatcacctctgtgtgcatgtatgtatgtgccagtgagaatattagcaagtaatggttgccaggagaagtggaaaagagagagaaggaggagcaggaagaaaggagaatagaaagctcccctccaactcttgtcccttcttccttcccgccttgactagggggttttggttgaaaggcacagaggaaaacagaaagttctgccctgttcccactgcattctactccaggctcaggttagcagggctgagaatgaagataccaaggaactaccctggcagtctgctccttctccctttccatctgttcctctgcacagccccacctcactcctgtgagccttcttccttgctacctctggcctttgttccctcctcatattgcttggctctccatccacctagagcccatcctcacttctgggtcctcactgcctctaccgcccagatgaaaatggccactagtaatgactctaggctgaggccgtatgcactcactctttccctctgtggagtggattcatcttagaaaccccagctggacccctgactccattttcccatagaaacttgttatgcctggtggataagttctgtacttctgtatcccagcacatcatgagaaaagctgcacttactggtttgacctgggaatgtgtcttcttttgctaactttaaagtgcaacttgttacttaggaaaaaaaatcagaaatcgacagtgtaatctttggactccagttcttgtgctggaagtggcctccatggtaaaagaaaacttagagacattttctgcaggcagagatgtgccctgtgcctatgccacaccgatttcagaatggggcagggtagggcagggctgtagaacaggtcagatgggcattcttctcattgctgggtgccagtcacctgccctgaccccaggagatgacaattttgaacacaagccagcattttagtgagatttgaatttattcagcaatctgcttgtttttgtttgtgcttgtttgttctggctggtcataggaatctcaaagaatacctctgaaggacttcatttgggggcccagtgtgaacattgctgatacgagtaaaatctatttctgagctgcaagagataaaaaaaaaagaagtcgtagataaaagcagttggaatatgtttaatgttattttaatctgttgcattatgtgaaatagtgttacagtttgcatacagattcctacttgccagtattcaaacttagaacagtgtcctctccatcagcacacagcagaaaaggcagccaacatatgcctatcaccttctacaacagcttgtgggggatcatggagcatagatgcagaatgctgggcttggggatccaggtaagcaagacagggtctggccccaagagacaggtgaagcaaggtgccaagtccagggatgacagtgaaggcagggaggagcagagagaatcaggctttccaagggaggagcagagagaatcaggtgctccaagggaggagcagagagaatcaagctctccaagggaggagcagagagaatcaggctctccaagggaggagcagagagaatcaggctctccaagggaggaacagagaggatcaggcgctccaagggaggagcagagagaatcaggcgctccaagggaggagcagagagaatcaggctctccaagggaggagcagagagaatcagcctctccaagggaggagcagagagaatcaggcgctccaagggtctaggaaagcctagtccatggcaggagtggtatagaggagggtggaactttttaagttgagtttatcttgtattattttagttttttaaaaaaaattattttaaaaaattatagtaaaatatacataacgtaaaatttaccatcctaactgattttgagttgcagttcagtgacagcataatcacatgttgttccaccatcaccaccaaccatccacagagctctttccgtcctgcaaagctgaaaccctgtgcctattaaacaactccctatttcccctcctcacatctcctggcagccaccattctacttttgtctgtatgaatttgaccattcgcaatacctcctgtaagtggaattatgtagtatttgtccttttgtgactgttttttttcacttagctttatgccctcagcgttcatctgtcttgtagcatgtgtcagaattttcttcccttttgaggctgaataatatttccttgtcccatataccacattttgtttatttatccaccaacagccagttgggttgcttccatcatttttctattgtgagtaatgctgctatgaacatgagtgtacaaatagctcttcaaatccctgctttcatttcttttgggaatatgcctagaggtggaactgctggatgatctggcagttctacttttaatttttttgtttttgttttgagatggagtcttgctctgtcactccggctggagtgcagtggcgcagtctcggctcactgcaacctctgccgcccgagttgaagcaattctcttgtctcagcctcccgagtagctgggactacaggcgcgcaccaccacacctggctaatttttgtatttttggtagagatggggtttcaccatgttagccaggctggtctcaaactcctgaccttaggtgatccacccgcctcggcctcccaaagtgctgggattacaggcgtgagccaccgcacccagctacttttaaatttttgaggaacctccatactggctatgccattttacattcctaccagcagggagggaacaggggttctaatttctcgtcatccttgctaacacttttttttcctttttgataataactatcctaatggacataaaatggtatctcattatggttttgatttgcattttcctaatgttagtgatgttgggcatctttccttttttttttttttttttttgagacagagtcttgctgtgtcactgcaacctcctactcctgggttcaagcgattctcctgcctcaacctcccaagtagcagggactacaggtgcccgccaccacgcccggctaatttttgtatttttagtagagatggggtttcactgtgttggccaggttggtcttgaactcctgaccttgtgatccgcccgcctcagcctcccagagtgctgggattacaggtgtgagccaccacgcccagcgcatcttttcatatacttattagccatttgtgtattttctttggagaaatgtctacacaagtctttccccatttatgagttggattgtttatttcaatccaactcaatgtataaaagaagtttatttcaatccaactccatgtataaagttctttatacattctggatatgaatcccttatcagatatgatttgcaaatattttcttcacttctgtgggttgcctttcactcttgatcgtgtcctttgatgcacaaacgttttcataattctgatggagttcagtttattcttttgttgcctgtgcttttggtgtcatatccactgaaatcattgccaaatccagtgttgtgagcctttctcactatgttgtcttgtaagagttttacacttttacgtcttacgtttaggcctctgatccactttgagttaatatttgcatatggtgtaaggtgtccccttattttcattatcttgcagtttacacatagtcgcataaattgaagtgatttgctttggagaaaaaggcagcccctgcctccctcccaccaccttttttgcccgctacacttgtcactcggctacattcacctgctatgcttgtcactccaccctgctctaatgccgctttctctgcaggctcttcttggttccccaagctaagtggctcttgcccttgtgtacctgcattgcagttttatgatacttctcatgtcgtgtctgtgctttcctaccatgcattattattcacgtgcttgtctcatctcttctgccaaattctaagcatctggatggctgggtttaagttgcatctctgtgtccttcagaccatatgccatagtgccttgtgcctcacggtgacttgtattttgcagaagcttaacagatattaactggatatccaattataaagagtcataaatagatggtattttatgattaacaatattaaatgtagaagtttattcagttcctgcgtaaatcaactctcaaattcagttttgttttcttgaaagtgtctgaaatactctgaaagctgccatccatattgctaaggcaagagaggagaggctgtcttctaccagtaccacctcagggctatgtaagaaatttcttaccttagtgacttcaagattgtcattaaaaactgcaatccatattttaagtcagacaacagaaagagattttcttgtgtttttaataaatgtgaacggctggaagcagccacaaagtatgtatcaagtgaccaattctgggcgtggtggctcacgcctgtaatcccagcattctgggaggcctaggtgggcggatcatgaggtcaggagttcgagaccagtctggccaacatggtgaaaccccatctgtactaaaaatacaaatattagctgagcgtggtggcacgtgtctgtaatcccagctactcggaaggctgagtcaggcaaatcgcttgaactggggaggcagaggcgaggctgcagtgagccgagattgcaccactgcactccagcctgggcaacagagcaagactccatctcaaacaaacaaacaacaaaaaaggagaataactttcaccccagactataagggaacatgctcttatcttgacacaaatttgatttcttcttaaaatagaaggtgtgagggtacctgtgcaagagggacattgaactaggtagggtgttttccagagcagtcctttttttttttttttttttttttttttttgagacagagtcttactctgttgcccaggctggagtgcagtggcgcgatcttggctcactgcaacctccgcctcccgggttcaagcaattctcctgcctcagcctcgtgagtagctgagattacaggcgcccgccaccacgcccagctaatttttgtatttttagtagagacggggtttcaccatgttggtcaggctggtctcgaacccctgaccttgtgatctgcctgcctcggcctcccaacagagcagtcctgatgagccctccccgtaagaaactgctgaaatgttggggcggctgtatgtttttgttataaggaaaaggtaacatttgtggaaggcagtacttcacagtgatacatttaatggttgcatattcaaatctcaaaagagattactagtaatctagagcaggtgtttcttatcccagaaagttcttaaagttctcagaattagttctcttgagacaagagccatattttcctgtaagccaatgaatcacaatttttaggattacattttctgtataggacaagcctaattataagttgcacttaaagtgacattccgtagtaaacagaaacttcataaggaaataaacaaccatgttgctttagatatgagtgttcagtgtaaggtgggttagttgtaaggaggacctcactgtgaactaacacgctgtagtgccacaggctacccagtagtagaatataaaagctttgctcacacatctgtgacagacataaaaggcggccgggcacagtggctcatgcctgtaatcccagcactttggggggctgagacgggtggatcacctgaagttaggagttcgagaccagcctgaccaacatggcgaaaacctatctctattaaaaatacaaaattagctgggcatggtggcgcatgcctgtagtcctagctatgcgggaggctgaggcaggagaattgcttgaacccaggaggcagaggttgcggtgagctgagatcgtgccactgcactccagcctgagtgcctacaacaagagcgaaactccatctccaaaaaaaaaaaaaaaaaaaaaaaaaaaaaaggccttccaggtctgtatttttgtatttttgttttatctacttcattagttctagttacatatataattctgtgattcaatcagtcactaaatattgattgagccttacaggtaccctagggaccaagagaaatacaatataaaaatatttccccagtaaacatacgcacataacatagaagacaagatttatggagttcagtcttatgcaattatatccagtcaacatatattgaatcctcagcatgtacaaggctgtatctaaactttataaaagaaaacagaaatgccatttggccttttagtaattgtctctgtaaaacttgatgaatttttattttatttattagtgttattttttttttgagatagagttttactctgttgcccaggctggagtgcaatggtgtgatactggctcactgcaacctttgcctcccgggttcaagcgattcttgtgccttggcctcccaagtagctgggattataggcatacaccactacttccaaataatttttgtacttttagtagagacgcagtttcaccatgttgtctgggctggtcttgaactcctgacctcaagtgatctgcctgcctcggcctcccaaagtgctgagattacaggcgtgagccactgtgctcagccaacttgatgaaattaatatgaatcataaaatcccccttgaaattctcagttgtttgaaaatttattcccaaaaaccataatgggaatattcacccaagtctctatggaggtttcactcttgatagatttttcatcagtttttcaaatactgaatctccgttttgatataatttatgttgttgcataaccctttcatggcctgaagccacactgaatgttgccactcatgactcgttgtaacttgtagttgagatgttgaaggaatatatatatatgtatttgaagatgtttaaggtggttccatttttttgcaaatcagaagcattattttggctagattttgatacaaggattgagaaatttatggttcacttaagaaatcacttttatttttattttattttacatttatttagcacttagtgtttgtttttcacataaatttcaatttgtatctcattctattcctggtaatagtagcaggtatgtaaatgggcagtggggttttgagagaataattatttaataaattatagttacacctacagcatccatgaatgaaagaaaaagttgctttaaaaaatgatataaagtgatttgatgaagcatttagtgtttcgtttttcaacttagaatttgtaccatagttatgtcagtttgcaatgagttccctaaaagctatgcgtatcagtccgcctctcattgctataaaggaatacctgaggctggataatttctaaagaaaagtgtatttggctcagggttcttcaggccatacaagcacaacaccagaatctgcttggcttctggtgaacgaatagagcaagaacccagtcattaccatggggagggcagcaagttcttcatgagggatccacccccatgacccaaacacccccgaccaggccccacctccaccactggggatcacatttcaatatgagatttagaggggacagacatccaaactatatcactaggatgctaagtcataaagaatacagagaaagggtcataggaaaatcattactgttgaaaaaagaaaagtcgtgttccttaaagcagctcagtgtatcagaatattgctgaagttttaatgatgagactctgtagggaaatatttaccattttggaaactgtaaacctgttgtttgtgttgatttcttgttgaatgcacagttctttacttttaatttagtaatttgagctactttggtatttgattagtttgaatcttgtttaggatgctcaagggaacttagagaagttcagtttcagttacattagtgagactaagtgacttggagaataggttccatccataatgtggaagctttaaatgccagtttaatagtttgacattgttctgttgttaagaggggacataggaaaacttttgattgggagaatgacccaaggattatgctcttgggaggaggaagagcagtccaaagggtattgctgctggctgagcaaagacactaagtgtagaaatggaaatgaggaaacgaacagaagaaatattttgttggaggaatttaggtctcgattgacctaaattggaatggatagggctaactgaagatgctgggaggggagtgtggctgttaacagggagaaaggggaggaggaaggagaatgtgcgggaaagatcaggagctcatcttacgatatgtatttgaggtgctgctgggacattcttgtggaatgcgggctcaagagaagcggtaggagtgaaagaaatgcatccaggctcattcgtcattgtgctcttagcacctagcttgatgtgtggcctgaaataatcaatgtcaggtaaatcgaggccgttgatgtagaacatttagtcaagaagtttgcacttttggctctgaaggaatggatacaataagagaatgaaccaccctaccttccttcctccctcttctccccttacccctctcccattccttctccgggcctctccttctgctcccctcttctttctatggggagagttgaacctggttgtatgaacatgccaaagggaagagaaaagaatgatgacgaagcataaaaaaaaaaagaataaatatatggggaatcactcctcccttttatgaagtctatgtaaaaaccattgaagaatggtaaccgtccctctttggagaatggaaaacactggaagcttgggtcacttctgggaccctccttagccaggagcacatcagtaatatttacagcaggggcaagttgtcctataaaatttgtgtctgtacttttgtcagtacgatatttactaaaaacaaaaattattatgtaaggaaataaaagaagcactaaaataattaggttctagaaccaaggcatgctgagtattaggtcttaaggcacagtcagaaaaaatataatgggaagaatttctggcgtgttcccatatgtatattcatgtggacacttttgtggatgcaaatgtctttagcagagaattgaatgtaagagactcttaggcagtcaagcagaatggttcaggatgagggcgagggtgaatgcaggaaggtggtagactggggtagaaaccttggcattgccacttattagctatgtgattatgagcaagtgatttagtctctctgagcttcaggttctctttctgtaaggagataaacaccatacctacctttggaggctgcagtgagaactatgggaaataatattaaaaagtttatccaacacatacttattgaatgcctacaacgtgccaggcactggtctaggtcctggagctgcagcagtgagggaagtgggtagtgtctgctcttgtggagcttacattctttttttttattttttatttttttgagacagggtcttgttttgtcgcccaggctggagtgcagtgatgcgattttggcataccgcaacctctgccttctgggctcaagctattctcttgcctcagcctcctgagtaactgggtttacagatgcctgccaccataccgggctaattttttgtagtttcttggccaggctggtcttgaactcctgaccttaagtgatccacccacctcggcctcccaaagtgctgggaatacaggcgtcagccactgcatccagcctcttggagcttacattctactgagcccaggaagagttaatacatttctcaagagggaatatttttaaagtgccaagtataatgcctgactgtgcatttaatcaacatgagtcaccaccatcgacttcacagagtgcacagtattttcttatttttatgatgacaaatgagtagggcttccattgacaaatgagtttagaactttgtattgagtatttttaatttgagagaaaaaattaattagtgctattggtgtgtgcatgccagctgaacaatttacatactgacattagtgataattatttgtttgtctaggaagttctgattactctaaaggggcctgggcactgattttaatgtatttgtgccgcttcctttccttcctattaaatagtaagtgcgaggaaatagtatcacttttctgacatttgcttgacacaacctgttctttaaagggtccctgggttatgtcacacatctggggtgaagacaagattgataaagcaatacttaatattaattttgcaggaaatatacataaattaattttgtaggaccgttttctttaaaaaatgaaaaccacttaaatcagagggaagatcactcttcaggtttgactaagtaacttggtatgatcattaatgttgtctgggagcacagatatctgaaagataaatacaaataggtttgaacacatgctagcacctgcccttgcaaacttcaagaatttaaagattgatagcaatcacctgagagccagcaggacaaaggtcaccgcagagccatcatgatatggagtgccataagaggaagcccacatccatggctctgtcattggagtttaactctttggggaaactacccgcaaacctcttagccaaaggcagtccattaaacctacccactcattcagaggattccctttggcaagaggaagctcttttaaagagagaattagggacctgctctcattaattaaaaataaaccttttatttttccctaagccagaaaagctttgtgtaattatagtgtggggcggtaaaggagatcccacacttcaagcctacatccatcaaggcatttggttaactgcccaagcaagtctgtccagggctttagaaaagctggcctttgtcttagcaggttacaggcatcacagatgcctcttcagtgtaccctcagatggcccaccagtgccgtgacacactcacctatatggacatgacatctgggcagacaggatgcaatttgttccctcctgttcctcttgaattgcttgttttcaaaagaatagatgaaacaaaagcaaagtctttgaggtttccctgaaacttggcatggattgcaacaaggttgtttctttttttcttttctttttttcctaaagtgtcctctgtatcctatttaataatccccactagctgtacactctttttgaggaattttcagtggaagagtaatgagtttaaagtggtctgcaataggagatactcaagttttgctcaactgttagatacagtttaaaaatagctcttgagttttgcagcgtggagcaccatgtgtgagatcctggacgacatgtgtgctatgtgtcgcaaaacccttcacaagtgttacctaattaacggcacaatgtctgacaggtggcagacccctcagaggcctgcaggaagagggggctcctgcacacacgccaccagctcagaacagtggctctgtgtcttggggttgtgttgcctctagagagaatgtgacttcgttggattgcaacagaaacagataaataacccaggatctgccctggaacacggggaatcattaagtgagattcattaccattcttagcaaccttgggtttttgccacacaaggccagttatggttagttgagcagaaatttgcaggagagaccagcctgaatttagacccagccattgagggagacctcattgtggggatttactggaaagactcagtcctccagtaggtagttgaagtctgggcaagcagcaggtgatggggaccctcaagacaagataatggggtagaggtagccctgggaaactgagaacagcccatatttgtgtgtctgctcatagctaggtctgtgagtaggtggaagagactcagtcactgaacatggatggggtggaacccctgccctgggagaagacgagggttattgtgcagttaccagaacaaggccttgcaaagaagaaatgaaaacacacttgggtacaggctagagagtaggggaggagggcagagactcaggaagctaaaggaagcctgttatcagccctggagcactgactgggagggccagtagatcttagggtagcagttaagagtgtgtatccctggtcgggcgcggtggctcatgcctgtattcccagcgctttgggagggtgaagcgggcggatcacaaggtcaagagattgagaccatcctggccaacatggtgaaaccccgtggctactaaaaatacaaaaaatagctgggtgtggtggcatgcacctgtagtcccagctactcgagaggctgagacaggagaatcgcttgaacctaggaggcagaggttgcagtgagccaagattgtgccactgcactccagcctggcaatagagcgggactctgtcaaaataaataaataaataaataaataaaagagcatgtatcccatagtcaaatcagatagactccacagagcctgccaccttcagacatggtcttgggcaagatgacttaatctctccatgcctcagtttcctcattggttttttttaaaaaaaactggaaataggcaaagttcctaccttataagtttttttcagattacacgtaacgaaaaagtgcttagaatggtgtatggcacccagttagcattagataaatgttggcaatgatgggaatgaagcaaagaagaagatgaagatggtgataatcacgttgatgataactttgatgatgatgatggttatgatgaaccagaaagcgctacagaagcacctgaagctccaggattggccctggcacatgtactcaatttataggtggagatgttgtgattgacaaaaggtggggaagtgggatgcaatctgaaaacaaacccagtggtcctagtgggcacttggtgaatacttggggcttatgaggtatatagatgtttggtagctccaaaggtgtttgacattgttctttctatagttaattttgacaacatctaggtgtaaataaccaaatcagccatcatttcaattttttgtttaccacttgcatatagttatttaagagggaattttcaagaaaatagttaatttacttttatgtatttccttaccacgccactcagcttttccctggctgcctactcgggataaacaaggacaaatggcagtctacgtgatccctgacaaaacccttgacacatgtggtagaagttatatatagcacttaacatggtttgtgtccttccgtgaacatgtttctgtcattgttttgcttcactgttgaacatactgtctttctcctgctttgtcagtcaaattatacaatgttagtaaccagcaactaaaaacacagtaggactttaaatgacttccatagtaaggcactgggctttatgtgtgatggtgtctccgcttccagtcttctctactctttcctttttgaattcacgatacagatatttattagatacttactctgaaccaggcacttcgctaggtcttgagatgttaatggtgagcaaccgatagcctgtgcccagggtacactgaagtctgagtacagatagcgtggtgcagtattccgatggaagcacctgatccagtcttaggggatcagggaaggcccaggaggaggcagcatctttaatttctctaaagttctgtgaatacaccttaatctccagaccccaaatcataacccttcttccaccctcagatcataactttgaaagccctctgcagtttccatgcagccagtcctttccccaagattgaatcttccttgaaacttactcccctcccatctcctgtccattctggcattgtcacgtggcatattgctcccaactttataatatttttggtgaaatttgagaggttttcttgttgctctgtgaataatttatggcaaaaacagacaaatcctctccatttccaaagatcattttctgtttcaggtaataagcatttacatgtgaaggccatttgtctggtgattaaaatttggaatattcaaagagagtcttcatagcaactttcaaaacgtataggtagaatatttaaaatctgtactgggatgggatgctaatggtttctcattctagcttggagttttggggcaaaggtgagcaccctttttggattctctttatgttttatagaatgaatgaaaaattcaagtgttagtgctttgaatttgcatacgttgttttagggcatgacagagaaaatgtggatgactttgaggttgatgccgtatccctatagggattatggctctttaaaaaacagatctgatggtactcatgtaagactcttgattgtctctattctttaaataacaatcatatctctaggttcacgtcatcctttttagatgaccatgtagtattggggatgccgtccgccctcctgtcctgtttctcagccacatcaatcattgtgttcagactcgctgcttttatctgctctgctacagaccatccgttttctgcccttggagagcaggtcctaataggtttcctgtttgtactcttctgagtttttgcttgttggcttttcctgagaaaaagacatgctatgtgctagggggaaattggcttagtttgtgtacatggagattttctatgtagtaatatgcataaccttatatgaaataactgttttgtaattaacaccctggtggtatttagctgattgaggccagttaagagacaacaagaaaatactttaattcttccttttcatgctacaggaaaggagagttcaacaaggtgttttaagaaaaagggaaagtaaagcaaaatttctgtgagaaaaattctgcattattgatgtttcaaaaatccttattaatataatacagtaaaaaagaagtgtgtgcgtattgaataatgtacctttaaatgacaagtgccctgcaaagatctatgtgtagaaaagaagtttgttatatatgattttaaaaagttaacatagatcttctatgtcatggaccttctatatcccagttgtggtatagaatcttgatagtgtgcgtgtgtgtatgtaaattttagatcaaatctgactctgggtctgtagaaggaataacattaagaaaaaccgattttaagcagaaacatttttgttctgctttcgactgtaaaatttgtatatatacattgtagaaaattcagaaggcttaaaaaaaataaggatgatacttaagtcctctattcacacttgcaactcagatataaccacatgcttttgtctgacatacatatctgttctgtaagtattgagtatctattaagtgccaggcactctgctgggtcctgaagatacaccagtgaagaaaacacacaaaatttccttccccagggagtttacatgccactgtttatatatgtataccatataccaaaatatacaatgacttcaagctgtatgctgaagtcatatggtgggcttgttcatactccttagccttcactaaggaatacctttcccttatgaattattgttccctatttttttaatcgttatgtaccctttgtctttgtctttgagtataccataatttgtgtcccccagtttgaactatttaggcaatttccaattttttgttatgatagaaataagtggctgggcacagtggctcacacctgtaatcccagcactttgggaggctgaggcgggtggatcatttgaggtcaggagttcgagactagcctggccaacatggcaaaaccccgtctctattaaaaatacacaaaaattagctgggtgtgttggcgcgtgcctgtaatcccagctactcagggtggctgaggcaggagaatcacttgaacctgggaggcggaggttgtgatgagccgagattccgccactgcactccagtctgggtgacagagtgagaccctgtctccaaaaaaagaaaagaaaagaaaagaaaggaaaagaaaggaagaaaggaaggaaggaaggaaggaagaaagaaagaaagaaagaaagaaagaaagaaagaaagaaagaaagaaagaaagaaagaaagaaagaaaaagaaagaaagaaggaagtgactatgaacatctttaaatgtgtatctttaccttaagagttcactgtctccttagggccaattatttttatttattattttttctgagacagagtctcgctctgttacctgggctggagtgcagtggtgtaatctcagctcactgcatcctccaccctccgggttcaagcaattctcctgcctcggcctcccaagtagctgggactacaggcctgtgccaccatgcccagctaatttttgtatttttagtagagacatggtttgaccatgttggccaggctggtctcgaactcctgacctcaggtgatccacccaccttggcctcccaaagtgctgggattacaggcatgagccactgtgcccagccagggccaattattagatatgagtgtagcaggctgaaaagtaggaacatttgaaagactcttgaaacactgttgaccacctggaaatgttctacagtctgcactcccaccagcagcactcttgccctgttcttatcttatacttcccagtatttagggagaaaaagttaccagtttggaaagtaatcttattgtgcttttaaactatattgctctcgttatttataagagcacacatatttttctatccttatttgtctgacccatctcttaaagtcatttgctcatttttctatttaaagtaatgtctttcttgtttatttatcagcactttttatatagtgagccatttagtccattatcataatgtggcacattttcttccagatggagaatatgcatttttgtccaacttctctaccaggtaaatgacgaggagggaaaggagaaggccctcctcttggtatagaggaagggttggcttttcaaccagaatctctctacctaggcacagcagcaatgactcagtcactgtgatggcagtgcccacaagcaccaatgcccaagaatcccatttgttttgcagacagggctgcttttatagtgccaatctatgctttctgcctgagctgccagaaccatgcggggtccaagcaggcatgtgagcatggagatgaactctgttctggataaacagtactccaccttgtcccctcctcccatattagtagtcagtgatccgtgtgaatttaattggtttccagaaagtgagtgttacgtgtatacgtcagtgtgccactttagagttgtagaaagaaaaagttgggccttgtggctgtggatgaatgaacatgaccctgacaaacagctgctgttctgaacagcgagataaatttatgtttaaaccacagtaaactatgcaaccaggtaataattttgagcaatgaagtatgtttgctgtagtaaccattacagacacagataaatcacagtaatttcaacgtggcacttttgccattcaataaatgggtattttaaatttcatttgcttttgaactaagtttcataatttatagagtaagtcattcaaagattaatgctcagaagggaggaaaatcactatacaagaacagaaacatgtcatttatgtatattacattggaactttgtccgcctgtttccattataaacctgattttgcaaacatttataatagaccaataaaaagtttgccctgggctagagtttgccatttgtttctgagattccaatttttatataattcttttctttctcaaataatatgatatctatccgtgtgtggttttttgtttgtttgtttgtttgtttgtttttaagatggagtctcgctctgtcgccaggctggagtgcagtggcgtgatctcggcttactgcaacctctgcctcccaggttcaagcgattctcctgcctcagcctcccgagtagctgggactacaggcgcacgccaccacgcccagctaatttttgtatttttattagagacagggtttcaccatgttggccaggatggtctccatctcttgaccttgtgatccgcctgcctcagcctcccaaagtgttgggattacaggcgtgagccaccgcgcccagccccatgtgttttttaatgtgttacatcattatacaacatgactaagtcaaaagtttatttattttaaaagcaaatttgtggctgatgatttcagaatgtattggcttgcaattgattctggagctttttaaagatggttacacaatatttaaagatggttagaaaatatggttcagagaatgagaaagtggttaaatgtcatgatagcaccacatgattttacaatagcaaagacaacaataatagtgacacttcattagtacaaaatgtgagctgatctattagaggaaccattcaaatttagcacctcctgtttgatcaggctgcataattttgtaaatcccttattcagtcacccaatctgcatactaatcagttccgacgttatttatatgataacatgaaagcctttaattttttatattctcagttactgtttctcttgcttaactgcgagctcttgaaggtcagtgactgtttttttatactgccagtacccagcacgtcaactgagtacaaactggtcaggaaacactcgttgaatagatgaagacataaatgtttgttcagttgtaggctgttgccaactttggaaggtcgtctgtttcaaatgtttgagtgattgggctagaacttgcagttccttctcccattaaaaaaaactcatgtaaacgataaattataccacaataacttaatttcatttccaatgattacactccaatcaagtagtggaattatagtagtcggtcagaggtctgaccagtttctgaagaaaaaaaaaaaaaatccccatcccagacagcagacagtcctgcagtcaagcttgaatgctccattgatgtggtttccacatgttgtaagtaatttattctattgttggacacctggctctgcttgccctcctcccccatcctttttaataaaatgatggtgagtccatctttgtcttttaaaaaattttttttcttttagagacggtgtcttgttcttcttcttttttttttttgggggggggaggtgggacagggtctcgctctgtcacccaggctggagtgcggtggcgcaatctcagcttactgtgggttcaagtgattctcctgcctcagcctcccaagtacttagtattacaggcatgtgctaccatgcctgatcaatttttatatctttagtagagacggggtttcaccatgttggcatgctggtctcaaactcctgacctcaagttgtccgcccaccttggcctcccaaagttctggggttacaggcgtgagccaccatatccggccagatggggcttgttctgtttgcccaggctggagtgccgtggtgcaatcataactcactgtaacctctaactcctggcctctaaggatcttcctgcctgggcctcccaaagcactgggtttactggtgtgagccactgagtccagcctcctcttaactttaaaatccttagtcttgatcatcccttttagagcactgaaaaccaggccagacttcaggtggggctccagatacacctaccccttcacctgcaggccactgaatctgactagaagcagctctgagcagccttctttggaccagtagttctcaaagtgtggctcctcagcctgtagcatcagtgtcacctgggaacttggtaaaaatgcagatgaaactcttgggtaggacccagcaatctgtgtttaagaagccctccagggattgcaaggcactaagtttgagaaccgctgacagggcttattggaacatggtcccagggcagagcggtgtaagtgattcccatgagcagtacacaggatgggtgatgtgtacttcagcggcatacttggtcatcatggtcaagggtccctgaagctcatggaagagatgaattgaagcttcaggcatggagtccaaggtgcagtggtcagatgtggtgggaggcagctctggaccagcacggccaagctagcttcaggatgaacactgcatgcacaaggctgcacgcaagaactttgtcagtatattgtagtacctaattgaaaaattaaactagatttaaaatctgttatgttttcataagagatttcactgtgtctgttaatgaaataaggtgcttttacattcttgaaatagaaattgccgtatttctgttggctgtaaaatgcttaataaatttaaaatggttgtaaaaaaggttaaaacaatttttacctcttagtttgagtaaaacttcttgttactaataaccaacaagaacatcaagagatcatcattaaacatcttgatctggaatggcatatagttctttcaagcatatagacagttatttcaaagacaattattttcaaagaagtaagctcaacattcttgaaaaaattggaaaatattttatttaaaagtattatgtcaattcgatatttaatatcttcactaatactctgattttttctctttcccctcccctcccctccccttctcccctcccatccccctctcccttcccctccccctcctcctttttttttttccctgtccccctgtgtcccccaggctggaatgcaatggcacaatcttggctcacggcaacctctgcctcctagggtcaagtgattctcctgcctcagcctccgtgagccactgtgtctggcctgattttattttctcaatggtcattaggtattactttaaaagaatacttctggccaggcgtggtggcgcatacctgtaatcccagcactttgagatgccaaggcgggcagatcacctgaggtcaggagttcgagactagcctggccaacatggtgaaacctggtctctattaaaaatacaaaagttagctgggtgtggtggcacacgcctgtaatcccagctactggggaggctgaggcagcagaatggcttgaacctgggaggcggaggctgcagtgagccgagatcgtgccactgcactcttttagcctgggcaacaacagtgaaactccatctcaaaataaataaataaataaataaaaataataatacttttttttccatttaaaattttctcagtttctcctagtgtgcagtgcgctctcattgtcaggggaccgctgtggggaaaggggtcggacagctctgcactgggcagttccctgctccctggaaggctttcccatgtttatatttttcttcccttctctgtgtaaacagccctgcttcctccaattgatcctgagtatttgataccatttccagacaccattctagtgaaggtgctctggtttccattgtccccgggaaatgtggcatccagagctgagcagagttacccagatgtcatgtgcctggtgcccgaacagaaggagtgttgtacctgtggcttagagttgaaatgcaaagtgagtgacttaagaattcactagatggaaaccccactgaagtggtgcgtgtctgtttcactgttttatcctcgttgacttatgggctcagtaactatttttaaaatgatggaatgattagatgaaagaggagatggaaaaaaacagagaaagcaaaaggaaatgagcttatgtagtgcttcctgtcacttttgtcttatgttagtcaatcccagtgagcaactggatgtactcagaagatcacttagtggtcgggcacggtggctcacacgggtaatcccagcactttgggaggctgaggcggctggtcacttgagaccaggagtttgagaccagcctggtcagcatggcaaaaccccatctctattaaaaatacaatatatatatacatgctcagtgtgggtggtgcgtgcctataatctcagctactcgggtggctgaggcaggggaatcacttgaacccaggaggcagaggttgcagtgagctgagattgtgccactgcacactgcactccagcttgggcaacagagtgagactctgtctcaaaaaagcaaaggagatcacttagtgagcatgggatgagaacagggagggtgagaggattctggggatagccactaccatctagaatggccagatatcatggtctttacccctgggaaattcacccagggggtggattatagtgtggatatgccaagtcctgctagtagaatgaaaaattgaattatagaacttgttggatttgttttttaggataactaaaatgtcttcatggacactgtgtcttttaatgattacatttatataacatgacactctggtgttttgtacactgtaaaaggtgcattcttctaacacaacactcacatcttattgaagtgatccattgccacattgtggtgtgtagatcttattcttatctccatgcaaaatgcttggtatgtggtatgcactcaacattggtaaagttgtagcttaaacgatctagtacatagttttaaacaaagacagtttagacattaaagcagtatacgccttgtttgacatgaggtgtgggagcaccaagcttgaccctcttagattcaaattactcctgaatttaaccaattcaactctgatgtattttagcacagccatgcttcaagatggtggaacttaccctcctgtcttcccagactgatttctgttcctgccctgggtacttcttgtctcctctgaatgggtacgggagtgtggacctcagggaggcccccttggtatgctcctccgctttcattcggggatctcagacctaatttcagctttgcccaatgtgaaagcatttccagagcaaggtgacttcttcaggaattttccatgtggtatctttcagagtaatagtgtgttatctctgccagaagccagaggagaaatttttactcagagaaagagccattttcctatggctaccttaagacataaaagtatagtaacatccatctcgtaactgatcatgttgtctgtctgtactgtagcatcccatggctcaccttttatgaactaactgaatccctgggcctactctactttgtagtcttgttccctctgctatttgtgtcatataaattaattagctctttagctttttacttttatcatgtaacactgaactaagttacttagccatcttaagtcattttctggaacgtggtgaggcctaaataaataagtaactaataactgcagaatataaactatcaggccgggtgcggtggctcatgcctgtaatcccagcactttgggaggccaaggcaggcggatcttaacttgaggttaagagttcgcgacagcctggccaacatggtgaaaccatctctactaaaaatacaaaaattagctaggtgtggtggtacacatctgtaatcccagctactcgggaggctgagggaggagaattgcttgaacctgagaggcggaggttgcagtgagctgagatggcgccactgcactccagccagagccacaagagtgaaactttatctcaaaaaaaaaaaaagagaatataaactaatacagcaaaaggctcaattattttaacagagagcactaatggctgggtggaaattgccacttcaggtttctttcttatgaaagcttgcagaaattcactgatcccttaattatggtgagacttaaaggttgcagttagtggaatagaattcttcagctgtgaaataaaaatttcccccttagaacctttcttctttgatatgatgggatgagagtacttttccttcagtttcactcggaagaaaatttcttataccaggccaagagcttatgggggtccagaacaatgactaacatcttctgctatacctcgagcaatacgggtgaaatgagacatgaaaagctgaagagttaggtatggatgaagaaactgacaggccactactgatttttacctaaaagtgattaaacattacaacattctgttttaagttcttatgtatctaggttgtagatcttaaatatttgttgaattatttttgcttcctagtgtaactctgcaatccaaaagtaaatcttaaataaaaacatgaaaatacacatcccatgcagtaaaattgcaaacacaaattaaaggaaggaagctgggcatggtagcacatacctgtagtcccagctatccaggaggctgaggcaggaggattgcttgagcctgggaggtcaaggctgcagtggactatgactgcactccaacctaggcctgggtgacagagcaagaccctgtctcttaaaaaaaaaaaaaaaaaaaaaaaaaaagaggaaggaaaaaagagtcaggcttattggcaaagtgatccaatttaaacaaaccaggcctaggacagttgttcacacttctaatcccatcattttgggaggctgaggtgggaggtttgcttgaggccaggagtttgagaccagcctggccaacatagcaagactccatctctaaaaaaaataaattaggcatggtggtgtatacccacagccccagctgcttgggagcctcaggcgggaggatcacttgagtttaggaggtcaaggctgtagcgagctatggtcacaccacggtactccagcctgggcgacagagcaagatcccatctctttaaaaaaaaacaaaaacaaacaaacaaacaaaaaaatcaatagattcccagtagtactcccttgtacagggagcctgtgcaaggctgtagaaagtaacattctcaaggggatgtcctggcagatagtaaatgctaagtaaatagattttgatggattgtggtggcatacaatgaatttcaacaggaatttattggaaggccatttacagtctagttgaggaaaaccagtaagtgagtagaagagtcgctacccataggtacatttaatgaataagtgatgtggctagtcattggtgtgcccatactcagggatatcatttaaggcccaagtgggcagagaaggttaaataggagagcgtattgggattggagctaaaggatgagtaggatttggatggatagaaaggagaagcactctaggtagcataagcagaagtgagacaccaggctcagtctgcactcagggagcagaggacatggtaactgttcactaagagggtttatgatcaggctatttggtgaagggggcttcttcttctgaaacgtggacttcatcctgtcagtattgtgtttccatgaaagattttgtggatttcgttttgttttagtcagagtctcgctctgtcacccaggctggagtgcagtggcgccatctcagcttgctgcagccttcgcctcctgggttcaagcgattctcctgccttggcctcccaagtagctgggattataggcgcatgccaccatgcctggctaatatttgtatttttagtggagatgaggtttcaccctgttggccaggctggtctcaaactcctgacctcaagcgatccacccgccttggcctcccagagtgttaggattacaggcttgagccactgcaccctgcctccaggaaagattttggaagagagaagtgacacagaagcagtgagtttctcaaacaatacacatcactggggaattttggcaaattgcagattttgattcaggaggtctgggatgggaccatgactggatgtatagcaggttcccaggtgatgctgatgcagatggtccacaaatcacattttgaatagcagagacacagagtactatttccagaagatggagttgacaatagtgattagaggggcatgacaccacttatagcccttttagagtaaaaaaggaccctaaagattatcaagtggtccatttgccgtttgttgccattggaaaaaccaaaccaaacaaaacaggttctaaaggttacactacagcagggagcagaactggactccagtctcccagctgacagtactttccatgcagccgtatgctggtagcccaggtagctgtgaggcgaaggactacaagtggaatggattcactggatggatgccagaaaccttgggaagagaaaagcagtagctttgggcagctgatttagtggggagtgagaagactcctaagacaatagattttttttttttttgagacggagtcactctgtcgcccaggctggggtgcagtggcacgatctcggctcactgcaacctcctcctcccgggttcaagccattctcctgccttagcctccctagtggctgggactacagatgccggcctccacgcccggctaattattgtatttttagaagagatagggtttcaccatgttggccaggctggtctcaaactcatgacctcagatgatccacccacctcaacctcccaaagtgctggattataggtataagccatcacgcctggctgacaatgttgaattttaagtcctggtaaaatcgacacatgttccatgaattgactggaatagagaagtcagacaagagtggaatgatttcctggcaagggtgagaatgttgactttcaggttgccctgggatctacatgcctgaccgccctgcactagtccatgtgttgactgctggagctcatctagtgggacggctggttcgtctgagacaggtcagccaggactgaaaggttaaacagcagccagcaggtcatggagtcaacgcttggactcccagaactttgcaaatagttagagtctctttgaattttcaataaaaataaagacgtgatggtatttttaggtttaaaacatggagaaaggggcctcctttaaaaggtgagaaataacctacttgaatctgatcatatggacccatttgtcataagcaggaaaccaaataaaagccaagactagatagtgtacaaagtaatataatttttttttttttttttgagactgaatttcactcttgttgcccaggtggagtgcagtgacgcaatctcggctcacagcaatgtctgcctcctgggttcaagcgattctgatgcctcagcctcccaagcagctgagattacaggcctgtgccaccacgctgggctaattttgtgtttttcgtagagatggggtttctccatgttggttaggctggtctcaaactcccgacctcaggtgatctgcctgcctcggcctcccaaagtgctgggattataggcgtgagcccccacgcctgagcaatatatacatttttaagtagagtttatctggaagtttctgttcttctggtttatctgttacttggtaaggatctctccggtgaagaacacatataatgtagtttgccaactgggagataccacaactctacagccttcttgtaaagtgataaaaaaaacgtaaatctgtgaccggcagcaactttccacagcagttcagagcttgggtccttccattaattgcatgcatcagtagtagcatgtggcattttacttttagctgcatgtggctaagcatccgatcgcctctggctttttccacctcctccttcctgtacctagtgtggaggaggagaacttggcactgagctgagctggtgggcgcctggtattcttcctctccatttttggaacagaagggggatttgtccctcctgcttttccagctgtgaagttcatttggcttgcagccttggcagcattaagggaggaggaacgtgtggatttccacaggaaggtggagacaaagtgggagtggggatgagggcatgatatttgttttccaggatctaattctgccctgggtgggtttttgagtctggtattttgcacaatgggatgtagctcctaaagccagaatgtcatcatttagggtcagagacttagttttgtatttgacctagtcccttttagtgtggctgtagatgtgtgtgtgtatacatacacaagcaggtgaaagcacacacaggtacacatttgtttcggttttggttttggcaaactactgatttcatcttgcaatacttgggttttgcttttgttgttggatttatttatttttttagcttctgtattagatacaataaatgtttgtggaactattttttctacaaattgtccaatctgacaataaatgcatttgaggtttttctccccagtaagatttttgatcacctgattcatttttctttttaactataccatactatagcggagcctcttttagtcaaagtatgaatatgaaatcatttcagcatggtccttctctattaataataaaatatacaaattttaacacatcaagaaaatatttcaatactagccatgacctaactagagaaataaagtattaatacttttgtttcttttttcttttttttttttttttttgagacggagtctctctttgtcgcccagggtggagtgcagtggcgtgatctctgctcactgcaacccctgcctcccagttcaagccattcccatgcctcagtgtcctgagtagctgggactacaggtgtgtgccttcacacctggcttatttttgtattttcagtagagacagggtttcagtatgttggccaggctggtcttgaactactgatctcgtgatccgcccgcctcagcttcccaaagtgctggtgagccaccatgcccggcctgttttaacatttcttaggtagctttttagcttaattgttggacttaattgttacacttaacttgggagggtttctttaagagtttgtaatgttaatgagatttgtcattcttaaattgttatcagagttaactttggggacttttattaagttttaaaaaatatatgaataatttgtatatgtatactttttattacaaaaggaatttgttatatatatcttttattatgttttaaaaatatattaaagtaattgaaaaaggttataaattgagaagtaaccattggcgtgtagaattcttttagatattttcttctgcatttatagacatacatatgtagataatttaaaaacataggggaactggagatttttttttttttttttttttttttttttttgagacggaggcttgcactgtcccccaggctggagtgcagtggcgcaatcttggctcactgcaagctctgcctcctgagttcatgccattctcctgcctcagcctcccgagtagctgggactacaggcgcccgccaccacgccaggctaattttttgtattttagtagagatggggtttcaccgtgttagccagggtggtctcaatctcctgacctcgtgatctgcctgcctcagcctcccaaagtgctgggattacaggcatgagccaccgtgcgcggcctggagatcgtatttttaagctaatctttcatctttagaaaaaagtaatgcaagactacatgcttgtaaaaaaattcagtgagatatactctcagcgttttttttcctctatgtgcacacattcatatatgaacaaacatgcatgcgttcatgttgggatatatttgtatttgtgtttagttttcactgttacacttaacttgggatggtttctttaagagtttgtaatgttaatgagatttgtcattcttaactaaggtatccatatgtgacttaatgatgaacaattcaatctataggtcaaatttcaaaatcttctcacctcaccagccacagaaaaaattcacaattcactttctttttttaatgtatttaaaacatttcaaactaagttataatgccctcacttaaggttcaagttcagccaccagtgttgtgtggctctcccaggtcattctgaggagtaatttctcattaaattctgcgtagaatatgctttttccaagcaaagtttatgtgcatatcatattcagaaattttaaaggatgtagccaggtgcaggggcttatgcctgtaatcccagcacttttagaggctgaggtggaaggattgcttgaggccaggagttcaagaccagcctggccaacataacgagacttgtctctattggagggggtgaggaaataagaaaaaaatattgaaagcattgctaggtgaggtggctcatgcctgtaatcctagcattttgggaggccgaagtggatggatcccgaggtcggaagttggagaccagtctggccaagagaccagcctggccaatatggtgaaaccccatctctactaaaaatacaaaaattatctgggcgtggtggtgggtacctgtaatcccagctgcttgagaggctgaggcaggagaatcacttgaacctgggaggtggaggttgcagtaagccgaagatcgtgccattgcgctccagcctgggagacagagccagactctgactcaaaaaaaaaaaaaaaaaaaggatagtatatttacacttaggaaacaatagtgaatacttttctaataaactctaaagttacattcaacttcagaatgcatttcttcatgtccctttgcaacatttagatggagtatctaaatttcataaatacgatttttccttatgaccaaagaaagtcctccagtaccaggaaggagtcaaattcttggtggttgagccacgtgctcaagattgagcaacagttaaggaactctgatagctaattcttaacttagaaatggtgatatttcatgatttgatgtctgggattttcttcaaagtaaaatgagatgaacatgaagtaacagtaaaggtatagaggaaacaaaatcaactctgaactgctgattgttggagctgggtagtaggaattggggagtttattatcctcttctctttacttttgtatatttaaaattttctataatcataggtttgaaatgagagacatgatcattgcagcctaatacagtgcaatattttgaccttaagtgataattcaggctgactattgccaagatatacttgagtaaatgttgtaaaagccacgagataatccttccagatattgtcatgaataaatggttgcaccccattcctcattttgaaaactcatgagcaggcccatttccttggcagtcagcatggcggactgtaattcccaaagctggccacagcgatgtctgccatccagtgttgctctcacggtgtggctttggcactcccccagctgagagaggtggccgtgaaccctgggagggcttgtgactctggcagatatcttaccataggaggctgttataggaggcaatacaaatctcagcactttgggaggccaaggtgggcggattgcttgagcccaggagttcgagaccagcctgggcaacatggtgaaaccccatctctacacaaagtacaaaaaaagtagccaggcatgatggcatgtgccacctagaggcatgtgcctcccagctacctgggaggctgaggtggaaggatcctttgagcctggaaggtcaaggctgcagtgagccatgatctcgccactgaattccagcctgggcaacagaatgagaccttgtctcaaaaataaaaataaaaataaaaattaaaaaaaacaaaaaaccaaaggggcaatacagctgctgcctgcctttctccatatgcttactcttgcaacccagcatcctgctgtgaggaagcctcagcaacccgtgcagccctagcatcagcttccagacatttgagtgagcaagctttccagtgattacagcccacccatcaagtcatccccagcttttgcatgttcccagctgaggctccaaacactgtagagcagagcaagccttttctgctattgcctttctgaattcatattcacagaacctgtgaacatcataaggtgcttgttggtttatgccactacatttgggatgatttgttacacggcagtagtaaatgaaacagtcggtgtatgttaggggaggagagaaggttcttatttctcagtgtacaacatgcccaaaagttatacatatttacacatatactcaatgattgttttgatgaggttcacaatgtttactatttctgtctacattgtgacatccagatcgggagctgtagtgtaaaccatcagctattctctgaataaaggggtcatggctgagcagtcaggtgcatggcacatggcacattataggaattactcttctgctcttttgtcattgacatcatgtgacactcatcagtgttataataacggaattttgccaatagtttattccatttttctttctccaatcatttataggtccttaacttagtggatgactttacaagcttctcctcagttgtgcaatatttttactttagaatgtgtttgctagaagacatgcatctaaatgatgactgtaatctcttatcctcgggggataaaattaagaagacgtcctgaaaaagttattctcttacttggtcttaaaaaaaacaagtcactagaaatatcactatacaagatctcctgctcaacatcagtaagctgcccttgataaaacaaacgtcctgcatgaaaacattgcctgtctccatgattttaacattatatgtcaaactatagccccaatcaattttctgaaaagtagctaaacaagctgggcgtggtcatgaactatagttctagctacttgggaggctgaggaatggcttgagctctgggcacaagacggcattgcgtgatgatcacgcccatgaatagccactacactccagtgtgggtaacatagcaagatgctgtttctttaaaaaaaaaaatttgtttaaatagctaaaagaatcaaatgcctattataagtagcaaatgaacatgctaagatgaaatgattaaaattttgcttccctatcatcaaacatttaatatggttgttaataagcaactactttgtatgcaggggcaggtacgttttgcataatgtaccatatatgttacgtttgtgatatgacatggcaaatgatgcacttagcaaataaaatctattcaaaaaaatgcagataaataaaagaagatcgtttcctagcatgactattatgattactagtgaggtagaaacttagagcttgaagaaaaggtaaaaatggaggaggggaggtgaattgaaccagtcacttttgctgatggttatagaaggtcatgggctgcaattgggtgttaaaggagcaatttcagagaaaatttcagacaaactaacagtttagtttcatcatcactctgagttctctgtaccaactcctgaataggaaggaagatttgggattaaaaaattgctaattatacttttgcttacctcctgccatttaagtttgtaaatttctctatgtgaggctgaaaggttaggtcctggaaaattgtgattggtctgtaagcaccagaaatgtccaaaagtatatatcccctttgttaactgcacctgagcctgacatcctaccattcacatttggaatatataactcaaaacattgtccatatactgtttggtagaaatggtgtatcaagtttggtacagaaatatgtctgtcatgaacagcggcagcaatgaaaaccaggaggaggttaatgagagttctatggaggttttacgccactgtgataactgtttataacaagggcctgagattaggggaagagtgagttgccagttcattaaattcttgtccattaaaacccatttctctttctggccgcttgtctacagtcatcccattctcagatgtactcatcccagcacattctttttttttcattgtggcaaaaaaaaaaaaaaaaaaaaaccaaaacaaacaaaaaaaaaaaccacgtaacataaaattcacactcccaacagtttacccaagtgtgcggtgcagcgttgtcagccacatgcacattgttgagcaacagattcccagaacactcccccacaatcctgcatgaaagtgcattcattccgatactctatattcgtgctggattcctgttccttatttaaaagtataactttgctctgagttatacttattttaatactttattgctacttttatacatcaacaaaaggttttcggtattggtgtagttttataattgtgttaatgatgaaaagggcaattgaacaattagatgcatgtgaaaatgcataatttacataatttatttttatcacaggtaatttgtttatctaaatactcttcgttttcttttactttcaaaggagatacagcctccttgaactatgaaatgagggtgttacaccatatggttttatctgtaatattctttgattcttctgcctctcacaatttaatgatatttcagtgcattcttaatatcaagtatttatatttcatttatcaactcgataccgcgcgagtgtttgtttttaaatttccagataggtcagttcatttgtgttagggaagtatagtgatttttaaggctgcaagataacattcagttagcttcccaacttcctaaagacattaacaacttctcctaagctattaagtgctctgaatacatttagaactttaaaattggattggggctgggcgcggtggctcatgcctgtaatcccagcactttgggaagctgaggggggcggatcatgaggtcaagagatcgagaccaccctggccaacatagtgaaatcccatctctactaaaaatgcaaaaatcagctgggcgtggtggcgcatgcctgtaatcccagctacttgggaggctgaggcaggagaatcacttgaacctggaaggcggaggttgcagtgagccgaggtcatgccactgcactccagcctggtgacagagctagactctgtctcaaaaaaaaaaaaaattggattggaagtctagtgtcgttggaaaacagctaaactcaaatgggttgcagtaaattcagtgtcttagtgaccaactaagtatatccacagaattatttcaccatgaactgtcagtccccttgactgaaattgtgctttttttcttctgaaataaaattgtcagcagagtctggcaacaaagtttggaaaatatttcaatcttagggggctagagctctcattttaaaagtattttagttttcccagaaaatctgtttatctctgccatctcctcccactctataccccaacctttcccgaatcctcccctctcttcttacatgtctatttgtctttctcgcgtgtgacatgtttggaagtcccgttaaactggcatctgttctgttttaggagaaacccgatgctagccccacgtcacttcagctgcggtcccagatcgaagtaagcacaatgactttaatcatctagttttgcttctgccttttttttttaagtgacactctgtacaaatcagatgaagcctgctgctctgaccacactgactatacgaatcttctctcgtaggagtcgcttggcttctgtagcgccgtgtcaaccccagaagtggaaagaaagtaagtctttctccctctgcccaggaccaccttccaagaaggtgtcttttaggtccatgctgacggaaatcaaacaggcgatcatgtgcgtatgtactatggagttatgcgatgtcattttccttaacatgttgcatgcatgtgtgtgtatctaggtggctaagagtgtgttttgtaatgcagttggtgatgtctgaggattttgtgaagagttactgattttacacttattgtgaataaaccctaaataaatctccggaaatagaaagggaaaggataggtgcattaaccaagatggattttcatcttttacattaatttttaatgtaggataaaagttatcaagaagcaagatacaaatataaaatatactatattccagaataaaccaatgattaaaaacccgtcttctgcacctcattttggtaggtgaccttaaaacaacagtgaatgtgtgtgttaaaaaatggcaaatgatccctagcgtttcctgttaaaggtaatatttttgcttccttgacccaacttggaccctgtaatttctgctctcatggaagctaattttatgtttcttgttatattttcagtatttcttttaggcaacataaataagacaaaaacaagagaatcttttttctaaaaccttttctttttctgctttattgcatcatcattgtactagaatgttctatttgtgatcttccatggtaaaaaattttaaagaaagtccacatctctaaacagacgcttcctttggcacggagccacttgtacgttcatgccaagggaggcacagaagtggtttaggcatcaagtatttctggaatgcaaagcacacgttggggagagcgtgtgtgtgctttagagcacagctttgcctaatccatccacgtgtgtgtgctgctggcacaggcggttctgggaggagggctgctttgccagaaagctataattctaaacttaagaggctttgtgggttttgttctggtctgaggaacgttgtgggtgatgtaccatagcaaaccaaggccactgcccactcaggttgagaagataactgtgcacaccccatcagctttttttgttttgcttgccttgcctcctcccaggaacctagtaatatggaggctgaaatagacaaaaaaggctcaagttgacattgactttgaacttggaggtattgtggtggggtagaagcatcgagtgaacgggctgtagcttttcctgccctagtttattatgtgccatgattcaggctgagagctcaggtgttccctcagaatctctgaatccttcaggaaacgagaaatgtttgctcttcctcctaagaggaagtgactcaccaaatttgtactaaccttagttaggctgggtagtacttcttcccctcaattgtggagagtcattctttccgtgtttatatcctttacttagtaaaatgtggcatggctcttgtggctgagagagactgatggcctcctctgaggttaacaaaaaattttaaacacacgcccactgtctccatttgtaatattgtcattttgcctctgtaattttaagtggttcaaacttaatgtgtttctaaacaatttgaaagtttaaaaacattttgtcctttatttctctgttaatggcttttgaaaactatgctatcctttgcttttaacttaaaaacactttcttttgaaaacttttatggctgggtgcagtggctcaggcctgtaattccagcactttgggaggctgaggtgggaggatcacttgaggcaaggagtttgagatcagcctgggcaacatagtaagaccctgtctgatccagcaccagccccccgcccccagcccccccaaaattagccaggtgtggtggtgcccacctgtagtcccagctactcgtgaggctgaggcaggtgggtcccctgagcccaggaagttaaggctgcagtgagttgtgatcatgcttgggtgaaagaacaagaccccatctcaaaagaaaaaaatattaaaataaatttaaagttacagtaaagtttcaaggattgagaattgtgcagtgaatgttcatgtaatcttcacgtgggccaccagttgttgacatttgcacactcctgagctttctctctctctctctcacacaccccctgccccccacatacaccaccattaattattattactgctggcctgtttgagaataaatggtagacatcatgattgtcacccctaaatgcttaagcaaatatttcctaaggacaatgacattctgttacagaataatatagtataatgaccaaatacaggaaacttaataactttttctaatacatagtttctattcaagtttttctttttcttttcttttcttttttatttatttatttatttttgagagggagtatcgctctgtcgcccaggctggagtgcagtggcgtcatctcggctcactgcaacctccacctcttgggttcaagctattctcctgccttagcctcttgagtagctgagattacaggcacccgccaccatacccggctactattttttgtattttagtagggacagggtttcaccatgttgggcagactgttctcgaactcctgacctcaaatgatctgcccgcctcagcctcccaaagtgctgggattacagggatgagccaccgtgccagctgtatttgttttactaattgtcccaataatgtctcttttagcagtgtttttccaatccagcactttttagaaaaaaaaaaaaaaaaaaaaaaatggctcacggcatgttggtgtcacgtcttttgtcacatttaatctgaaagggtttcttagcctttttcagagtgtaagctagttgtttgatgaagtatttgttgtttagggtttatttgtttttgtgtttttttgcgccacagtgcattatatcgggggcccgtgatgtccgtttatttcattattagtgatattaattttggtcattcacttaaggtggtatctgccaggttttctctgagaagttacaatttcttctttgtagtgaatatatatataatatatatattatatataatacatattatatatttttatatatattttatatatatgtatgtatgtatatacatatattgtgaggtgatcctctgagaccgtgaaactattatgtttctcatcaaacttttacctgttggttttagattctttccatgattcttgcctgaatcagtgttactgtgatggttgcagaagggtgatacttattcttgcattgatgattattttgtataaaatctcccaagaggttttgtgtttaaatttcatttgcttttaaagatgtatcaccctgaaaatcctaagtcagattataatttgaataggtttgatgcattgtcgctatagaataatttatacattgtatttgaagatgcaaatagacaatctcactattcccttacatcaaaatgcttgctgggagccttgctgttgagtacaggaccctcaaagggtgacctggcgaaccagttggctgtgtctggttggtgtctgcaaaagtctctgccaaccaaaatatcattctgcgtcagagtggtgttctgtgggcagaagttttctctgctttttattccaaaaacaagagaacttagaaaacacatgtgggcaagacctgcaggggcccacccttagaagcagaaatgcaaagaaggaggcagcgtggaagctgagcactgctcctgcgactcctgcctcgcagatccagtctcccagcttgtctcagggaccccctgtgtgcacgcctctgtcctccttgcccagctgaaacctattctaagggaggtatctggccttaattatgtttcaaatgtctgtttctaaaaaataacatcacttctgtcagtagtatttagcatttaacagggtttaaagtctcaagtcacaggaagttagctctgaccagaagagggggagggagagagacaagcagtgagatttccgacatacctggcatctcagcatctattgtggatgcccctgccaagtggggctgctgacctctagatgtgcttgacctgcatatacaagaggtgggttgataggtaggtgataggtaagtaggtgtgtggaaagaaagaacagaccctccctaccccattatgagtttggtggggtccccattcatccttattttcttacactatctggtctctccatatgctttcactggaagtttaataaagaaggccaagggagatttcatttgagcctcttctctttatatctatctacatcgcttattgatgagactatctgttactggaagggggtcctgatctagaccccaagagagggttcttggacctcatgcaagaaagaattcagggcaagtccatagagtaaactgaaagcaagtttatcagagaagtaaagaaaccaaagaatagctactccataggcagagcagtggcatgggctgctcgactgaatagacttacagttgatttttgattatatgctaaacaaggggtgaattatttatgagttttctggggaaagggcaggcagttcccagaactgagcatccctccctttttagaccacatagggtaacttccagatgttgccacggcacctgtaaactgtcatggtgctgctaggagtgtcttttggtgtgctattgcattataattcacatataatgagcagtgaggatgaccagaggtcactttcatcgccatcttggatttggtgggttttggcaatcttctttactgcatcctgttttatcggcaggatctttgacctgtatcttgtgacaccagtcctgccaacctcctgtctcatcctgtcactaagaatgcctagccttctgggaatgcagcccagcaggtctcagccttattttacccagccccagttcaaggtggagacgctctggttcaaatgcctctgacatacctgctttattgctcaatctcggatttgtgtcaactggctgaacaggtgaaattaactaattttctattaccagacacttttaagaatatttagagggtaaggcttttcttgagagggctgggaaatagctttataactacaacaaatgagtttagctacgagtcgcagaaaacctgacaaatagtgattccttagacacatctgagttccatgaatgggtccagggctggctccatgactcaagtcggccttcagaaacccagatggctggactgctttcttttttcttctttctttttctttcccgtcatagcctcaaagtggctgctgcatcttctaggtgggaagaaaaagcagggcgaagagagggaagaaggcagtaggtcccaaggctaaaccttgtgctttgcagagctttcctagaaaccctgtccaccacattccagtgtgtgccactcatttcctcgtgcagcagctgtttgctgaccaactaccggttgtagaaggctcccttcagggggcccaggatatagtgatggacagaactgtcacgagcttacgtttgaaggcaggggcatatactagaacaaaaattacatatttaaagtcatggtatggagaaaaataaagcaaagaaaggggacccagaattgggtcacttgaccaccatagctataagggagtttagagaagtgagcatttttaacggagcacattgctatcctgaacaacatagggttcttttttttttttttttttttttttttttttttttttttgagacggagcctcactctgtcgcccaggctggagtgcagtggcgcgatcttggctcactgcaagctccgcctcccaggtccacgccattctcctgcctcagcctccccagtagctgggactacaggtgcccgccatcatgcccagctaattttttgtatttttagtagagacggggtttcaccgtgttagccaggatggtcttgatctcctgacctcatgatccgcccgccttggcctcctaaagtgctgggatgacaggcgtgagccaccgtgcctggccagggttcttttcttaaggaaagagggtgaatagacattgcgtaggagactagcagtattttctatgaaaagtttaacttttatttgtatgcatgtaaacaaaggaatctgaaaattacctagatgtctgacaagctgtgtgtcaagattctttagtgtcattacattcaaggaagccaactgtagggagggccacctggctattttgtaatatgtttatggaggaaatcttcatggggtggtttatatagactaaaaattgaaaaggcatagacaggtaataataggtgatgcttattgagttcttattatgtgccaggaactgagctaagcacttaacattgactcacttaatacaaaaatcctacgagatgacaaatggtatgattcccatctacaaatgcaaaactaaaggacagaggtaagttgcccagggccacacacttactaagaagcagtacacagatttgatcccagttaagaacccataaccctaaccacagagctgtaattccaaagtccttagaatgcattgcttatgcaaatacagaggctagtggcaaatcgtgttcgttagcatcaaataaacagcagcaggtaaaacctacacttcagggctcccttgaaaataggagcaaattctaccctcatccagatataagctaggtcccagttatttatctgtagaggcaggaaggtccaaaataaatctcaaaacttcacctaagccaatatttataacttcttttctactaagtctttcactggagttgaacattcactgatttagtttcactttttttcattatctgtggctacacttgaactattttatggtgaaaaagtccaaaaatatatagcacgatggaaaaggaaggtaaataaaagtagagaaggccaatagagcagtgttctgtggtgaaataaagaggatcgaatatagtttataaatgttctctgcggacacttactctccttggacaatgcttcgctctcaggtatgttttatctggcaagctgattactcttttgataatgtcagctttccttttctccctctcaaagatctttgtcttcaccctctttcctctgactgcagggaagaagtcccagcacacacatgcctgttgcagtccctccaactccctgctttggatcatctgctgctctcttgattgcttgcaccactgatctgatcttgtcgtcatcctcctccccttccttctcctcctcctcctccttttcctcctcttcttcctcttgttcttcctcctcttcttcttcctcttctcctcttcctccttctcctcctcctcatcctcctcctcctcttcctcctcctcctcctcgtcctcctcttcctctgtggtctgccatccacctacctggccaccttagcccttgctatgtgctccctaggcagagcaaaagccgctgcagtttctcagacaggccctattctcccagggcgtgctgagccttggaaatgctgctccttcagcgggatactctgtctcccactctcaccattaccccccgctgcccactccccgacctttccctgggcaagctccattcaatcttaaaacctcagctctggggttggcccctcccagaattctcccgtaatccacagacttgaggtgaagtggcctggtacttggcctctacaccccctggactctcctgcttctattgcagtggagagagtgtgtgtgtgtgtgtgtgtgtgtatgtgtgtgtgtgcgtgcgtgcgtgcgttgtcaccttccaccctgaactccttgagccctagatcttttgcttctctcctggcacacagaagatattccataatgttgaataaatcgattgagtgagtgagcatgcacaaacatgcttaggtcttctttactctagaaaaatcttcttgccgttcttccagactatgtttctttttctctctttccctagttgctaaacttttgccatgaagcctggctcctgtcttcattccctgatgaaatgttatttcagaggtcagtggcttcataggaacctaaccagaggcctctccccacgtgagtccctgttgcattgggtcctgctgacttttccccgggtcacacttctctcatctcccttggtggctgcgactttgccaccaagtttcgagtttcttctcctttatgtgcactctgtgcagctctgcccaccccttcctgtgagtgcaccccaggctttttacccagcctgtgagctctcccaaggctcttacctgcgcccatggctttgagctctttaggtactcattgtagatttaactctctcgctctgacctttgcaatctggtggcctgcctattacagcctcttgctgaaaaatgcctgctcactaatatctcagccacccaaactgcccattcatataacataattcaccacttcctcttgacccttctctaactacctgctctttgtccacacttccctctctctatccttgagaaacttttctgcccttcacccagactttttcatcatgctgtcctgctttttttccttgacccttgattgtcagttgccaaatcctgtttttcaacttctatagtctttcctttgtttccctctgttttagtccattttgtgttgctgtgatagaatacccgagactggctaatttcatttcatttctttttttttttttttggagacagagtctcacccaggctggagtgcagtggtgcaaatctcggctcactgcaacctctgccttctgggttcaagtgattctcctgcctcagcctctcgagtagctgggactacaggcatgtgccaccacgcccaactaatttttgtatttttagtagagacagggtttcaccatattggccaggcttgttatgaactcctgatctcaagtgatccacctgcctcagccccccgaagtgctaggattacaggtgtgagtcaccgtacctggctgagactggctaatttctttctttttttttttttctgagacgtagtttcgctcttgttgcccaggctggagtgcaatggtgcaatctcggctcactgcaacctccacccattgggtttaagtgattctcctgcctcagcctcccgagtagctgggattacaggcatgcaccaccatgcccggctaattttgtatttttagcagagacagggtttctccatgttggtcagcctggtctcgaactcccgacctcaggtgatccacccgccttggcctcccaaagtgctgggattacaggtgtgagccactgcgcccagtcggagactggctaatttctaaagaaaaatgtttatttagctcagggttctgcagcctgggaagttcaagagcatggccctggcttccggggagggccgtcctgtggggtgataacatggtgaaaaaggccaaagaggaagtgaatatgtgtgaagagccaggaccaaacaagagagtaacctcactttataacagcccactctctcaggaactgatccatttccatggaaattaatccaggccctcaagagggagaactcactcactaccacaagcatggcagcaaaccattcgtgagggatctgctcccgtgacccaacacctcctgctaggccccacctcccaacatcaccacactggaaatcaaatttcatcatgagtttcagtggggacagaaagaccatacccaaactatagcactctctgtttatttttaatctttattgttccaagtgagacccttaatgctctttccgtgaactaaagagcattcaagaaattgcttttggatttatctcccgaaaatacactcaggccacatctcattgaggggatgctcagctctccccagtgacatctataaattaggacctgtctaggttttcaccttggtaatcagtggcccctacatatatccctagcccttctttattgctcagtctccccagcaataacctcatacctccatataaccccaattccagcccaactggatattacgattacccaaatgcccccttggctgtctgaatttcatgcattggaagcatttccttccttcaagtcctatttgaaggactgcttctcactgagtactttctcagtctcttaactgtctgtatcctctcctctccttggactctagtagcattttccatggatctgatgtctcttaatgtactttaacacgtatcatatcatcattgttgttaacatcatcataacgtggcttctcgggtgatgtctatgtactgggtactgtgtgaatctcttattatatgttatcttttttttttttttgtataaactcattgaggtatatattatatttgagactcattagcttgcctaaatttccagagctagaggcaaacatctcaatccattctgagtgtcattatagccttggaattaagatgccctacctgataccagactctctgggttcaaatccaggttgtcttccttaccagctctgtaactcttgggcaagccacttgacctttctatctgtagtttccacaattatcaaatgaagatgatcattatagtgcttacctcacttagccatcaagagcatagtaagtgcttgataatcttgtctgttatctatcttgtctggcccacattcatgcctttgcctgtggcttgagccacttgtatacttccctaatcccagaagaaccaacatagtcatgagccctgaggctgagagctcactcttctgattttcttcagtgtccagaataatggtttgcacagagcaagtgctcatttagtacttgcattgaattcactgaatgcccctagttatttgaaatagggctacaaatggattgttcccaggactggaatttcagagaagctaccttgggcttactcgtgacccaacatgtgtcagtgtctccccagactgacggtgtgaataaaaagtgctttcggcttgtaaatatcaacattataaagacacctctaaataaacatttgacatagtagcttccataaattgccaaatctttttctaagggttgccccccttttcttaccggattctatttcatagtctggttcaagtctccctagattttcctcttctaaaatagaaacaactgctgagcacggtgagatgcgcctgtagtcctagctactcgggaggctgaggcaggaagattgcttgagctcaggagtttgggactagcctgggcaacacagcaagacccagtctcttaaaagaaagaaaggaagaaagaaacaacagacgacataataccttcagatgaaggtacaataccaagaaactcatacgtaatattgtgatttagaaaatcatgctgtggaattatcagtccgcctttggaagtagaccagattcagtgaaaagggctgatgaggtctgtgagtttgctaggaaatccaggtcaagccacgtcccctggtgctgacatgaatgcatcctgtctccacatcctgtttgtggcggggctgtggtgtagggtggagacacccatgttttcccccagggagcatgtgtgtgtgccctgcgcctggggcctgtgtgtatgggagtgaggatgtcacacagaggcatgcccttcagagtgggtcacagggcgcttctgccccacggaggtggatgtgtccttctgtgcccagcatcttctcggtccccatgagctgttagagcatccctaagataaccaaaggcaactggagccatcattatttgttttttcaggcacactagggtgggaagcataggcaaaatggcaaacttaattttcagaaaataaatggactggcccaagagccaggtgttgttatgatattaggtactcttctgccttaatcagtagaggctgagggcatgagggccaggtcactggccaggaggctcgtccatctgtgacttgtcctctttgccacttcatcttctgggcttcagctccctcgtgggcatggtgaggagtgtgagtcaggtggtctccagggtccttctagctcaggccatcttttgttttctgctccagtctaaagcatgccctgcaccgatcaatttagcttggactctgcatatcccactatgttgtagctggcctaggctctggagctggacagaatctgagcgtgagtttacgctccgctagttgtgggactgggaacaagttattcgaattctttacgcctcaggtttctattcaataaagcatgcacaaaaacagctcttttcaagggtggtgctgtgaaatgcccagcacactgcctggcacgcgataggtgctcacattctgctgttccctcccctcaccccctctgtaatgtgcagtgctgcccctggtgagggcagtgagtctgtggtgtctcttctcaggctcattagacggtgccatacacacagagcttatcactggccatggtcccctaaaatatgcccttcccacatgacctttcgtttcttttgtgatgcctgcaatgggggcgactaggaaacaacagctattttcatagagcctgtgcagtagcaatgcgctgaagcgtgcgtttgtgcaggcataactgcgtccacacgtgtgtgtgcacgcgtgcaccattgcacagcatatttgaagggctcagcattccagaatgcaggagcttggggtaggagcagctggtccacaatcctcctcctcagctgttcccaactggaaactccgttgcccttccctctgtctggcgagtgagccaccagccgacccggacacagcttgagtccgcacgtctgccctgtgtcctttgccggtggcaggctgtgtgtgttcttgctgggatggctggggacaggtgctgctgccaggaattgtttaatgtacggaggtggctgctgtttattctctctcctgcataagaagaaacagaatattaggccaaggatggggtgatggtgggaggctatcagtaaataaatatcattcctatacttgcaggaagatgtggagactcaacacctacagcttagtgcgtgctccctgcatgtcttattaattctcctaccaaatctataatgcagatggtattctacagttaaggaaaccaaggtttagaaaggtcagtgacttagcaagatcacagaccttgggtaaggcagagctggattctgaatccagctctgtttatctgcaaggggcagactgcttctcatccacccaactacaggtacaatcaaagactggggtgctcggagagaccagtgatgggccaggcagctcaggaagtttaatttgataagcatttatccagcagtaagccctggaaagatgagtaagataggtagggtagctgtcctcttacaatctgaagacatggaaagatgcttataatgcaatgcgaaaaccatcaggacaggggaactgcagaaggaggtatggtgaaccccgcttgggggataggcatggtgctgagggccctgtattttggcatcagtcagggttctatttgagaagtagaatgttaagatagaataaggacttggttatatgcttttgacctcatgcatcacagcccgtgctggctgcacaggccaggtgaggctgttccttctgtgtcaggtggtacagcctgaagtcagcagggcaggcagttcagcaaaaacaatgcctgcaaagtgaagagagcaaggacaaagtccaccctgccagggtgggctgacacccatgccatcagtcaccgtctccaagcgaggcttcagcttcgcgggtgcagagggcctgcaggagttgttgacgtccttcctcaggagctccacacatcacaggcccaggactgaggagctgaggaggagacccagcaggaatgtgagcgctgtgggcccagctgctgccccatgccagcccctgacccagaggaccaacaataacagctatagcagggccccatgcccacactgacggtgaagcacggaaaaaaaagagctactttctgcatttcatgtaaaatctctcttgtggtccaggctaacctggaactatgcaaggaagagaattcggagaaatgtaatccggctgttctaaattgtcaagactccaaatcgtcacaggttcccataggagtgagaacctgagggctgactgggggttctcttaggcaaaagcagagaggaaggaagttcctggtggaagaaagggtgtgcgaaaccataggagcacagcatcttgggggaatgggtggtggagccccaggcctagctggtggaaggctttcagagccagctcaggcatttcctggtgatgggctttgtattttagacgggccactgtcagcgtgaggaggtgggctgtgtgcatcacaggaggcagggagaactgtgaagagagggagagatctggaaggtctaaaggccttgtcaagcctttctttattttgcttccactttctaaattcttttatccaccggctgattcattacttcgttgaatctttagggagtgtctccttcatgtcaggaatgcttggtggtcaagacaacgcagtccccaacctctcatctaaaagctttgcccaaataaaaccttacaagtcaggataatgcttgaaaagtatttgccacttgttttatcgtattactctgtattcttttctgaacacctcacttgcagtattgcttattttattttggaggtgttggatacaaggagggaatggagaatgaagatgggccctgtgatccctggcctctcctaggccaagccagtggttgcaagcatatctgcacatcacaattacttggagagcttgttggagagacagatcctcaggccttgcccagacctaatgcattcaatatccagatgtggaaccctggaggcttctaagaagtttcccaggagactcttaagcagccagcttggctttattcatcgccacccagatcagtgtcttgtcagctttaagctcttggcttctactctgcatcgtaagcacaggtcgagttgggggctgttcagctgatgtgggtagaggtcatttcatcgtcacggtgaccttggaaagcttcccggtgtctgaatcatttccagcaggtgctggtgcgctcacaacatcagaaggggaaggacgtgaagtcatctgagggcagggtgaaatcagcgagtggagtgattaagaatgggaggacagggtccacttggagtgagtctaggtgtggagggcgcatggaagtgacagagatgcttgggaatttaaaaatgagatctgagaagacaggaaaacttgagtttccattttcatagtatttataacatatacaaattttccattagccatgtctgtgaatgaattagaagtggggcaggggaaggctgaagtggttgctgctggctggacgcagattcagggctgccgcgtgtccatgctgcccgttgggagaagtagggcaggtgggcggctcccacagccatggtctggaggggttgttggtcactgtgctgtggcagcgagaggaagggccctccatgcccgcagtgcctccagccttggccttcagtgctgcttcccctggactcccctgctgcccccagggcagctggcagaagaaaagcggcagccccaggccccacatccctccagggtcctctgtgtccaggctgcacaacggcctgcgtggccagcaggcctcggggatggtgaatgggagccactgtttgtttccactgagaaagtcctgacctgcttccggagccattgccatggaaacgcaaggaggaggttcttgaatggagcctctttcctccccatctgccctactcccttccccaccccaggccgaggctggtaagggccagccccctgctgcctcactttccccctaggttcttgcacatttggtaaaaatactcaaagctgggggccctccctgcccgtctctatagggatcagtgaccccatctccataccgcccgagcgtgtggcagcccattctcacagcagctcttaacctgggcctgcctcacgcaaacagagggccagagagggccttccagaggagcccctgccagcctcagccacatttccccatagaaaagcctctcttggaccccatatttattacacatatgcaggaaattttaataaaggaaatagagcaaacgaataattttgccccatttacaaaatacttgggagccatttagtaatgtaaatagcaggcgcagtggctcatgcctgtaatccaaggactttgggaggcagaggctggtggattgcttgagcccaggagttcgagaccagcctgggcaacatggcgaaatcctgtctctacaaaaacaaacaaaaattagctggacatggtggtgcgcgcctgtagtcccagctatttgggggctgaggaggtgggaggatcacctgagcctggggaggttgtggctgcagtgagctataatcacatcacttcattccagcctggccaacagagtgagacccagagtgtctcataacaataataataataataataataataatataatgtaaacaaaggtactttctttttagtaggctgcttaagctcataagaaatttttgctcatttttataataactagtttttgtggtgaaaacaatgtgctacagccctgttttattttattttgcttttgataataatttagtaattccttaagacaaaaaaaaaaaaaacctaagtaaaatttaaaattcacagtgaggccataaaatgaaggcatttgtttttactggttagatcaaaaccagaataaaaagcagaatttcaaggccccctcccccgccccttttttttacaccttaatttttatgcctactgaagaatcatcaaaagtcagaatttgacctgaagccgcagactccaggggcagcattacaaacttaaattgcactttcagtaccggtaattagagacaatgtggttttggctttcggctcacagtattgcaccaggtactgtgaatactgtgatcagtaagactagtgaaccccttgactccatgaagctcaagttttagtgggaaaaacattggtttgggtgtcggaagagctgagtttaatctccagctctgtgacttacagtgactaattgcgtgaccttggacaagtcacttatataaagactctaggccagaatctcttcatacatacagcaaggctagtttttttgagtgtttttgtgagactgaaatacgatgagatttatgaatctactttggtaagccagaccaatgctttgtggaagttagtcattttcgtttcttcgccactaactgtgtattcatccatcctcacgctactaacaaagacatacccaagactgagtaatttataaaggaaagaggtttaattgactcacagttcaacagggctggggagacctcaggaaacttgcaatcatggtagaagaggaaacaaacacatccttcttcacatgatgacaagaaggagaagaatgtgtgccagcaaagggggaagcccttataaaaccatcagctctcatgagaactcactcactatcgcgagaacagcatgagggtaaccgcccccatgattaaatcacctccaaccaggtctcacccctgttggcgacacagagccaaatgatatcaaactgttatgattatattcacctgcatgtaactgacatgtgacttcagtgtttagacaatggggacatcttctcatatagcaggtagtctggagttgggctttccaaggcttgagcagctgctcagggaattattccctctcctactctaccatccttagtatggaactttcttccttatgataaaatgatgcctgttccaggagggataatgggaagagccgggcaaaaggcatgtagatggagtaaatcctttttgtcatagaaacactagctttcttagaaacatctcacgataaagttctagtatttcttctctgccagacactgacacttggcctcaactaacttcaagggagtctggggaagtgagtttttaacaaggtgtactgctaccccaaacaaactcgggactctgtaagtaagaaagaaaatgaactggatattgacatgggaggcaactagcttgactatttttatgttacagtaagatcttcttgagttttgtaaactcctggaaggtatgcgccatgtcgtgtgcagtttactcatccagtggcatagagctttattatctataccaagcaaacaataaatcattgattgtatatgaaactggtcagttgctgattcctttttatatgacctctcattataaaaaatactatgtgggctgaggcatgggggctcacacctgtaatcccagcacttagggaggccaaggtgggagaattgcttgaggccaggacaagaccagcctgggctacataatgagatgtctgtacaaaaaacaaaaaatcaaaagattagtcgggcatgatggcatgcgactcgagtcccagctacgtggaaggccaaagcaggaagattgctcgactccaagaggtagaggctgcagtgagccatgattgtgccactgtattctagcctgggtgatagagcaagaacctgtctcaaaaaaaaaaaaagtatacacacacacacacacacacacacacacacacacacacaccctctagcatatgtcacggggatattctgaacattagttattaactttgaaggaattgagaaggcatttataacttcacagtgctggaataggtgctgttactgtcaatagtgttgttagtatcaaagctggcattcatggagcaattttatctcaacttcttatgcagttcagacccatgaagccacaaatgaagaaaaatatggcccagatggaaaagagaagacccactgaggggtttttggaaacctcagaggatgactgaatcccatcccagatctgattctccctccttcaagcccacatcgctcctgcacttggatagtcctggccttagtgaggccgtggcccagacacaaccagaccatgggcctcccctgtggagagatggcatttggctgcttttcagatgtgaaactctttaagtttctgccagtgacccacatcattaactttcggtacaagtcaccagttggtgaatgaaaggacacaaatctctttcactgcacctttgtagggatttttagagtcaacaggagtgggatctgtccttggcctggaaagccttttggccattcccgaggtgccagagaaccagccccttacaagttaagaaatggaagtatatttgaagaaggactgaggatgacttggttcataggtagggtggttgaaaaaaaaggccgctaataatagctagcttattttatttaatttttttagtgcttagcatgtgcaggcatgtagtaagtaaagtaaaagtcacaacagaaaactctaaaaattctatgtgatcggtaacattttgtctctgttttgcatagcaggaaactgggaatcagtgggactaagtaatgtgcccagagtcagtagcaggtagagcttggctttgaatactggcacttggactcctgaacccacattctgagccattcattgtgtggtgccacttcctgggtagtggccttatgacagcatttgagacatccttcacatggaggtaccagtcagctgctcatgatctctaccacagacagaacaaaaggaggcaggcttgatttgcagcaggaaagataatgtttagttacctacaacctccatatgtctaatgcaattagcaggggattgaaggataacaaaggtgattgtcaatagaactaaccctgcatgtctaaattagctgcatctttctccttatttttctgagcaagatgcccttttgagacatcttatatagaaggaataggctgacttaaagtggttctgatggcagttgtaaatcaaagatatacaaagagggtggggtagaaaaattaaacattctacaactcacagttggagaatttagatctttcagtgtccatctagcacctccaagtgtgagaatttggattatggggcaaaaagtcctctttgaaccagaattaaagattagatggtattactgtttagagtcaacgtccacacttcatacctgaaaatcctgccatttctttcggagagttaatgttttggagagttaatgataattgaggtaatcgacggactcaagccatttcccttgatgtaagtgcctatattgaaaagctatgcaacatcaatgacaaattatttagtagacagtgtgccatacacaataagctaaatactgcttaaggaagacaataggatataataacatgagaataatggaaataatatgctgaaaatccattggataaagagattttgatgtcatgcttaatcattatgtgtgttgttttttgtaattctaaaaaacatacaaattgcttttataaagtggcaagtagaagagaaatccttgtgtccatctcaattatttgagagaggttaatgataaaataatttacaaggaggaaccttagtgatttggaaacttagattctagaataggagatacctcatggcaatacttggtggaatgggaacagcgagtctgctggagaagactaagttcgtcagtttgggactgctctgtgaatagttacaagaagtaacatttccttggagcttccccagtgccagacactgcgcaaagctcttaacattcactgtctcatgtgatcctcttaacagtccattaaggggtactgtttttatcatcacaactgcacttagaaagacagtcaaggcttagattggtggcagcgctgtcatttacccctagttctgcctgactcctgaatgtgtgtgctgggtcaggccattgtcttggttttggtattgcagacacctgccttgttcatttataaaggtgaccctgtaacaaaaagccagcaagttcaggctgggaatagactgtgaaatgaaagaaaaaacctgtatggggattgttttgaccggcttgacaaaatgtcacccatgttgtcattgatattgattattcctggagttctaacagtatgccagattttggcaatagaattgcttttctgtctcagccagtgaattcacaagctaaatcatggggccaagcaagagaggtgcatagggcatggaatttaaggaggcaactcactccctgcacctgccggattctgagagaatcttacaccaaatcaacaccaaatctgtaagaggtgacctcttacaacttgggctatctgtgtctctctggcatcatccaagtcctggccctgtggctggagaaagggtgactcttgagtttttatggcaactagtggatagtatgaattgaattttgtttcatatctatttctcttaaacagaggagataggtttgtgtgataaaagtatctttgatacccaaaggatagaaagaaatattaaattgaggaattacttctttaacatgtaatgatttgtcatgaaaggagcaaaatatgaaggtacagttatccatacttaagtaggacataaagaaaatgaaaatcttaactacttcttaatgtaagcccttcaaccttttaaccttcccctgcctccccctgtacatgcacaattcagtagcacagatgtgtcaggcttttttttttaaatggtggagaaaaggctgctactggctttcgggactgccttggcaggcctgggatgatgcaggaaaagacccagacacagcaaaagaccagatttcaaattcagcaggaaatcaactaatggagaagttgatttcctgagactcaagattaaggaactttgaaaatcccttaagtacaggttttccagtaacatatagcatatgttcctttcttggaaatgaggttataaccactttcctttctttttcttttcttttcttttttttttttcttggttataatgaagtttctggacagctcatcaaagccaaaacatgaagtgtattttaggaatttgtttatgcttggccattcattgcacttttctggtgtgctggactcagtatgtagaaacgagatagagttgtctttgtctggatgtagcttagactatttgtatataaacagaagaagaaaaatgagtttgagccatagtatttggcttcctttccttctagaagcagataggggggtcttgcaatagccagatagtcaattcctgaaaagtgttcttggaatatttagttctgatacttccatagaccatggtgaggtttggtgttgaaaactttctgtttttgcaggttcttctgagtatcattttagcaatttactcaagagctgggccagtatgtaatggtatcccctttctgtctatcccttaaataatagaaaagaagcatcctgttaaagaatgtatacaatttggaattctgttatacaaatgaggaggagtctggggaagagggtgaggtgttgaactcaggagtcagagacgtggccaccaagcccagttatgcccttgcccagcacgattggacctcaggcatgtcatcactcccatctcagtgacagtcctattctgtgatggggggtaatgagagtattgcatttgagaggtggaattctatacaagtgtaaagaatttcatgttgacctgtgttgtgttcctcctcctactctatggtcttacgaggatctccactgtaaagcagtagactcactggaaaagaaaatatggcaacctagagtttccactgtgtggagtgagagactgcaatataatttttttttttttttaagatggagtctcactttgtcacccaggctggagtgcagtggcgcaatctcggctcaccgcaacctccacctcctgggttcaagtgattctcctgcctcagcctcctgagtagctgcgattacaggtgctctccaccacgcctggctaattattgtatttttagtagacatggggtttcaccatgttgtccaggctggactcgaactcctgacctcaggtgatccacccgtctcggcctcaaagtgctgggattacagggtcagacactgcgcccagctgcgatataatttttgtaaaacggagtttaataatattctaaccagaaaggtaaaggagcactctgccttcttttccttctcccactggctgctcctcctaagtctcattgctgggcctcactttctctttatgaccactaaaaatcgggttgccctggagctcagtcttcataatgtttctcttcgtagtgttcagtcagagcttagagtatgcaagtcacttacaaattcttatctgcagctctagactcacatgtccaactgtttctttactgtctgcacagggatgtttaataagcaccgcacacttagcatgtccaaaggggacctcttgttccctcccctgctgttcccctgcccagctttccccatctggggaagtgaatgttatttcattatttaggtttctgctcagagaagccttctctgtcccatcacctcaacttctcctcactccttgactctgcagtcgcccttcttgaatctgtcttgtttattgctatgttctcaggacctcagaggatgcctgactcctactgagaggtgaataaataaatactgaatgaaagaatgagtgaaaatgaatacacaaagcaatttaacaaagaatttgttaaagacagaggtaggaggaaagaaaccagttctggggatactgtctcttaaattatttttatttttcaatgggattgataaattccttaatgtaggaattttcttaagtgaattttgccttcaggaacagctaaagcagtttagggatcttgaggaaaaatgttgacacttaagcagatagatttggggtcttaatagtaggagttattgatgaacaaatatttgctaaggttcagttctgagactttaaatccaatacttgatgataattaaatgtttaaatggatttttaaagcacagcagaatattaattattgcttcctggtcatcaaaatccatgctgaagttaccatactttttacccattgacaatgaaaaagatgagtccaaagagcagatccagctccagcgcccaccatcctcaggcctggggcttctggctggaggaaggaggtactactaccaggaggcctctttggagctgacgtctgagcattaatttcttccaccaggagattagtaaatgaccccttccacctgctgccatccacttttggacttgggttatatcattgatttttgctcctgctggatgaattgtaataatcattctcaaggagaaaggagatggcattttgcactgcttctatgccagcttctgtttgcagggagaaagtcactgcatccaaattcacacattgaatttggattcaacgtaaaattcaaaggattgtaaatttgatgagttggggagcctcacgcttatgaaacatgggcttgttattctttggccagcatctaggtggtgaacttgtgaaattttaaaaacaaaatcccactcaccacagcaagatgaataaagaaactacagtgccatctgctggcatcctggggaagttcaagcaatgcctgggccaagtccaaaccggaggataaaattattcaaagtgtgtggtagtttgaagacagtagattaaaaatagtgaaaatattgtcagtcatcatttcagagaggaaaatgcaatcacattttgtgctaatggtgtagcagtgggagcgtacatttttctgcagtgtactttttgaagtattttgatgacttttagggaaagtaaaaattcacaatttgtgttttcacttattacataataagttttatcctgaggtggggatatttggtccatagcagttaggtcaagacttctctagtcctggccggtcacggtggctcatgcctgcaatcccagcactttgggaggccgaggcgggcaaatcacctgaggtcaggagttcaagtccagcctggtcaacatggtgaaaccccgtgtctactaaaaatacaaaaattagccaggcatagtgtcatatgcctgtagtcccaggaggctgaggcaggagaatcgcatgaacctgggggtggaggttgcagtgagccgagatcgcatcactgtactccagcctgggcagcagagtgagactctgtctccaggagaaaaaaaaaaaaaaaaaagacatccctagtccttagggtgaggacaaaaatacatatggggctccctgtccctctggtggccccttacagaaaacatgtttaaccagctgcagaccccagcccgctgaagtaaggtggcagctgcacagtcccatgacttgaagtgcaaagtacagcacagtaagattttttaaaaaaattaagaagctaaacttagcagaaacccttctttctttctgaaggatttcctgcctcagtccccagccaactagcttgctcttattttgctcccacttctcccgtggccctgagcatgttacatttgctgcttctcttcctcattcttctcctccccttccccctcgtcatttcttatgcttttttgttcctgtctccctccgtctctaacctgtggctccccttccttcgtgttcatccatgtaccttacttgtgcgttgttcagtacattttggctgaaagatttaaattttgaaatggctacctcctaaaagccttgcaggtaaatacaggtattttcatttttgtgtggataggaggaaggagagtaggtcctagccatgttttggcacaatttggtgataagtgagattttccttacatgttctgtattcacagcacaggaataaggggaaataactagaattcaaaactagctcttgtcctctctagcggtttctcccctgattctgttcttagctccgactctcccttagtttacaatagaaagctttcagatttttgtgctggtcatcaacagttctctgcactcagccgtggagaatggtggtgcttgcagggcatgggcctgccactcagaaatggcacccagtggtcagcccacaccagtgcagctacaccaaagggtggtggcttattaaaggctgctctgcgtgaaaaagcctccctcccctctctctggtcaccttagattctcaaggtccttttatccaaaaggtaggcagaaaatcactttaggtgattaggatattcaattcttcttcctctgaatgagacagagtctcattcagtcacccagtttggaggtcagtggtgtgatcatagctcactacaacctcggactcctgggctcaagtagtcctcctgctgcagcctcctgagtagctagaactagcactatagatgcatgtcaccatacccagttgaactttttagaagttttttttttaaagagacagtgtctcactatgttgcccaggctgctctcctcctgcctcagcctttgctctaattttttcagtgtaactcatacctggcctcccactttcttgtcttccctagccttcagatgcaaaaatcacctcttccatcttccttcctggtggtgaacttgtagtgaagattcaggtttaaatcccccaagtgtctgtgtctcttctgatgcaggtgccttctttctggtttcccttggctgtaagcccaaggatactgtattttccttctgggatttggacacacctaatgaaagattttgctccacactctactgttccctgttcctttttttttttttttttttttttttggtgatacagtttcactctgttgcccagtctggagtgcaatggtgcgatcttggctcacttcaacctctgcctcccagattcaagcaattctcctgcctcagcctcccgagtagctaggattacaggcctgtgccaccacgcctagctaatttttgtatttttagtagagacggagctttgccatgttgtccagtctggtctcaaactcctgacctcaagtgatctgcccacctcgttccctttttgatacaaccaattttaactttctttggctttcccgctttctttctttaaattttgtttgtctaagtttttttctggagaaatgcttaatgaactggttttgggctgtgcacacttttcagattatttgggttaatctgtatctgccttcacaaactggcagccaaaggtgttggggtgggaggcaaattcgatgcccagacatgtattgattaatttggacacatgtttaaaaacattggtttctttaccatcacttaaaaatgttagagctcttgtataaaaatacagatttctggctgggcacagtggctcacgcctgtaatcccagcactttggggggccgaggcaggaggattgcatgaggtcaggagttccagaccatcctggccaacatggtgaaaccccgtctctactaaaaatacaaaaattagccaggcgtgatggcgcatacctgtaatctcagctacttgggaggctgagacaggagaatcgcttgaacccaggaggcggaggttgcagtgagccaagatcatgccactgtactccagcttggactacagagcaagactgtctcaaaaaaaaaaatgcagatttctgtcttctttttgaacattggaagattcagcaggatggacattgcacttgccaattggcagcaaccaactggaggaactgtgtactggccgccccctttattagggacactcaatatcctgttgtgggtgtctcacccgcctccctgccccctttgttttcctagagccgaccactgtactcatctgtgggcccaagtggcatttgtggtgctgagtttatgttttcattattatttgctttctcttttcctcttacacaagagacttcccaatggcagtaacttcacttgtattagtagttcacagaatgaaaggtacttcagtgatcgtctagtgaagtctgtcttcttcatttaatattacaggtctcaccttcgagtgagtctttaataaatgtcgacaaatggcacacgagtctatttctaggaagtcagcagatgggtagaaaaagccagtggtaaatagcctataacaatttccctggctgtattaagtagtattgatgctgggtcaaactagttaggaggattttcagttctcccatgaaagcaaggctctctggtaatctgatttgtttttcttttctaggaaccctcttcataaatcaaactcagaagacagctctgtaggtcagtaccacttttcttggtttacctatttaattatttcaatactttatagaaaacacgaatatgtgaaaatacaaaacccacaagaatccttctactcagaaataaacactgttaagattttgatgtacatccttattctcctttttctaggcagttttaaaaaaatataattgtgatcatattctgcatactgttttatagtttttaacttgaatatgttatgagcattttcccatgactgaatattctctacgttaatacagaaaaattagaagcaacctaaatatccagcaaagaatgaattggttaattagcttatggcacatccaatatggtggaatattatgcagacttaaaaatttactgctgctataaaaatcctggggtctgtgtccctaataatgtccttaggataaatccttcaatttggaattttttggatccaagattatgcataattaaggcattgtatgttttatatattcttgattataaaattcactcttggtttagtaacagctattttgtttgggtcacagggtgggtggctgatagtgattaggaacattaagtactcaatcaaccctggctgcctgactttgaatatgccgacccaatagctatcaccttgtgcagctcacttgcaccaagcctcagttttctcatctgctaggtgggaacaatgatgtgtcatataattgagtattaaatgaaatcttgccattagatagctaagtgcctggatatagtagctgaataaatgttagctattaccatttattaggctgcatctctgtttcagaaacatgaaaatgggagaagggagaagggaatatagcttatagtcaaagaaatatattgtcagcctgtgcagtggctcacttctcttatcccagcaatttgggaggccaaggagggagaattacttgagcccaggagttcgagactgacctgggcaacatagcaagatgctttctctaccaaaaatttaaaaattaggtgggcatagcaccatgtacctgtagtcccagctacttgggaggctgaggtgggcggatcccttgagcccaagagtttgaggctacagtgagctgtgattgcaccactgcactccagcttggacaaagagaccatgtctcttaaaaagaaaataaataggccggacgtggtggctcacatctgtaatcccagcactttgggaggccgaggagggtggatgacgagatcaggagttcgagaccagcctggccaatatgtcgaaacctcatctctactaagaatacaaaaattagctgggcgtggtggctcctgcctgcaatcccagctattcaggaggctgaggcaggagaatcacctgaacccaggaagcagaggttgtagtgagccaagattgcaccgctgcactccagcctgggcgacagagcaagactctgtctcactaaaaaaaaaaaaagaaagaaaaagaaagaaaagaaaaaagaaagaaaatgaatattcccgaactgtccaagagcaagattgagttaataataactagtctgctttaaccctgcatgtctgacatttgcttcagtgttaagcccaaaggcagtgggtgatacaaaacttgccatgaagctctgtctttggcggaaaggctcgggtttcattcccacagctctgggggctgtcaaaacttaaatgtgagggcatcctgttttgacagacgacgccctttctagcctgggagcaccaaagacatggttcccacacgtctgcttcattgcttggcaccaccagtctagactggggaaacccatcacttcgctgggccctgtttccagtggccatggagcaaccagacagacaacaagtggtgacagagctgctattttgaatgtgccacatcagcacgatggcagacaccgctgctgctgctttttatttgtaaagaataaaggactgctctacccactcattttacttactctcccctttcgctttgcttttaaaaaggtattacgtgttatcaatgatcggaaccctaccacatattaaaaatgtctagctatagcagcgaatttgttttcacttgaaagtcaccgcagtcatctggaaaggatcgggggtgcggtgggtagagggagacccatttgggagatgacacagcgggattgcagtcttgcttgtctttgtgccctgggtaagctgtaggtgggtcaccaggtagcctgaatgccagggagtgccataagcatgccatagcaagacccgtgcagaccacacttctgagagtaacactgggggccagacccagagaaccaggggaccaactcccctgacctgtgggcccaggacataccaaccattctcttcttgttgttaaatctggaataacagaaataaaccaagggtagatcaacaacagaaataacaacaaaaccaagtgaacttcttaaaataccctatttgtggtgtagttgaaataattgtggctaagaccaaaggggggaaatatactgcaagacgaggccaaattaggcatactagttaaacaaacatcaaagtaaacacaagaatgcatgttctgccttcctttttgatgtttccgtttctcctcttaacctcactgcaccgtttcttgctactaggaaatttgcatttcttttaaacaactttataggcatctcccattctttcactaactgaaagaaaaaactgtccttttgtgaaatcaaagtattcctaccagctttgaattacaaggaagaggctacttttgttattaatgatgaatttattgcttgtgctttttgttctttttttttttttttttttttttttttaaggaaaaggagactggaagaagaaaaataagtatttctggcagaacttccgaaagaaccagaaaggaataatgagacagacttcaaaaggtactgcaatgcagctggcggacagtaggtccttttagctctaacatgggaagaatcctatgcggctaatctcagtggatgctataagttagcgtaactcaccgcatgtgcccataagatgttcaacttttctgacatttctgttattactttaagactttgttccagtgattttcttttgttttaagtcaaagaaaacaaaaggggacaagttcacagttctttcctttcatagatctgacagcagaggccgaaactttcgtttcctcagttgcaccaacctcagaaagatctttactcttctctcgtcaagatctagcctgaaagggcctagagagccctagcatgtgttggtttggggctctcctgtccgcgttcccactgagatcctttgcattcttctgaacttctgatgctcttctgcagcgggacggttatggggtgttgcccctggaaactccagtggtctgacatcatgggaatttgcccgggcggctttgtgaagggagttctgccctactcttggctgtgtcttttgttgttgtttatatagtaagtaaatatatcatccctttgaggctcagttacataatttatgtttccccagtattcagagaagaaaccagaacaaatccacttccagattccagtccagctgaatgaggttatcagtagattaaaaagttttccttgatcaccagtgacactgcttgctttcctttacaaaatcttagtgtcctgtgctgtgtggaacgtctgtctaattatcagtacgcgtggaaatgagaaaaacggatgtgaacagcagacacgtcacagcacacctgggttccttggcaacattccacttggttcttttttcaagttgtcctacttttaagcattcccagttttttgtattcacccagcgtcacttgtgattcaaaataaaccttggattctaaaaaaaaaaaaaacagtctaaagctaagggaaagggagaggtacagagggagagggagggaaggaggaagccaacagtttaccagctaatgtggatttttaaagaacccaaccaactccccatcacccactctgccatttgcggtgacacagatagtaaaatgaatcaacccagcaggcttctctcttcacccagcacacgctattattctccctgtgcaagtagcaaagggaacttgagggaacttgaggagtatttttggattgattgattacaaaatggaaattagatggaaatacagggcaacataaattccaaagtcagccgtgcctgaaatggtttcctacaagtctacaggcagactctttccctctgtctcttacaccaaaggcaaattaagccacagccgggggcatcctaacgatattggaagctggtaaaaagtatgaatgagaaagatggggaggagagcagggtgtgggactggagtggggatgttaaagctcatgttcagtaacatgtccttccccacacgctgaccagaggcaccattgcccaatgtggctcagatataccagaggcaatagcagtctgtttgctctgtaggaaaatctttggaatctaatgggacattctcttctctgaggttctagctgccttcaggtgcgagttggaagttgattttccctcagtttggaaaccaatttatgacaataatactttcagatacagacctatatggcacccttcttctgattaactcaacatgcttcatgtctgtgatttgcacttagcattttttatttatttattttttttgtcttcagatggagtcttgctctgtcacgtaggctggagtgcagtggtgtgatcttggctcactgcaaccttcacctcccgggttcaaagcaattctcctgcttcagtctcctgagtgtctgggattacaggtgcctgccaccatgcccggctaatttctgtatttttagtggagatggggtttcaccttgttggccaggctggtctcgaactcctaacctcaagtgatccacctgccttggcctcccaaagtgctgggattacaggcatgagccactgtgcccggtgcacttagttttgaggaataataacagtgaaatagcttagtaggaatggaaggttttgccaggtctgaactctgtgaccttcctctgtcatgacctaggattctttcccacttctttgcaaaaatattttcttctcatttgtattgctaatggaaggacacaaagaacccacagctgaaggagccttggaatgcttgtatgatccagttgggtgtgtaaattagatctttactccacctatagcgaggatctctctctcactttcctccaaaacccatccactgggtactctatctcaaaggctctgatcatcttgaaggatttgtttctatggtgacacccacgtgttctgcaagcctgtttctcaatcagaggtgcttattggcttcttaaaaagcagcatatttttgccaccctttgcttcatcagtaacgttcaacatacatagtgtcctgagcaacattcttctctagcccgagacagcagatgttccgcattgacgttctgtttcgccattcttgttttcactcctgttgttctttgtcctcaatctccaggagaagacgttggttatgttgccagtgaaataacgatgagcgatgaggagcggattcagctaatgatgatggtcaaagaaaagatgatcacaattgaggaagcacttgctagggtaagcatgcagatacctggtttatatttgtgaggacttgactttctgaagtgtaaaaatgtttgcggccaacaaggggtataggaatcaggtacccatgttgtcagataaaatatttattctgtttacttgatacaaacattctactttgtgaggtgaaacttctatggtcaatgaaaacgtgaatgaatgaatggcaaatatttttgatctgtggaccacattaatgaggaaaatggccttctgaatgcagctgcaaaattcacaagccttttgaaaagaatgtaatcagtagtaaaagatcaattattaaataaaaatcaaatgtactaaaaacattgtaaacatcaggattttttgtttttttgagatagggtctcactatgttgcccagactgtagtgcagtggtgcaatcacaactcacagcagcctcaacctcctgggtccaagtaatcctcccatgtcagcctcctgagtagctgggaccacaggtgtgtgacaccacacctacctagtttttaaattttttacagagacagggtctcttcatgttgcccaggctggtctcaaacccgtgggctcaagtgatcctctcacctcggcctcccaacatgttggaattacaggcataagcaagcgcacctggcctataaatatcggttctataagatgccttcacaaactgaattttgaataatctaaaggttatacttactttcatatccaagtaaatattaattgcaatttattgtgtttgttttttgtttttattacttccccctgagttaagttaggcactacaagaagcctaattaacctttagtatactagagcagcatttatgatagtaaggcagcaatttattaagagattccctgctttgttgttgaacaacaaacccattgattcttgaattttcactttgaacagttggttcagtactgtgcagataagtcccaaataaacaggtttagaaattgacaaaaaccttcaaatcaccaaggaaccattgaatgagttaagactttaccattgtcttggtccattttgtgctgctgtaacagaataccacagactgggtaattcatcaagaacaggaatttattggcgcatagctctggaggctgggaaatctaatgtcaaggggccccagcaggtttggtgtctggtgagactgtgctcttctaagatgacaccttgtacaccacatgatctgcaggggaggaaggctagatgcttataagccagaaggaggaatgccaagaagctaaagggggcaaacttgccctttgataatgacggtaatgctaccctatcacctcccaaagtttcacctcttaacaccgccacaacaactaccaaattctcaccatgaccttggggagaaacaaacattcaacacatagaaaccgtaacattcaacctatagcaaccattgagtggaaccttaaaggtctgaaaccttgaaacaatggcacacatatactcagtttagtttaatatacagtagttccctcttacatgcaagggatatgttctgagacccccagtggatgcctgaaactgcagatggtaccaaaccctatacatactatgtatgttttttcttatgttcctatgcatacatatccatggtagagtttaatctataaattaggtataataaaaaattaacaacaataaaaataaaatagagcaattacaacaatatcctataataaaagttatgtgacaaagatgtccattttcactactgttattccacatagtactgaaagtcctagctatagcaatcaggcaagagagagaaataaaagagaaccaaagattccactgaaaaactattagaactgataagtaaagttgcaggctacaaaatcaacacatacatttctgtgtatgtgttcagcaacaaatactctgaaaagaaatcaagaaagtaatcccatttatagtagccacaaataaaatacctaagaataaactcaaccaaagaagtgaaagctctctataatgaaaacaataaaacattgatgcaagaaaaggacaccaaaaaaaaaaaaaaaaaaaggaaagctattccctgttcacggattagaagaatcaatatcattaaaatggctatgctacccaaagcaatctacagattcagtgcaatccataccaaaataccagtgacatgcttcacagaattagaagaaatgatcttacactttgggaggccgaggcggacagatcacttgagatcaggagttcgggaccaacctggccaacatggtgaaaccccgtctccactaaaaatacaaaaattagccaggcgtggtggcacgtgtctgtagcaagctacttggaaggctgaagcagaagaatagcttgaatcggggaggcggaggtcgcagtaagccaagatcatgccgttgaactccaacgtgggcgagagtgagaatccatcccccccaacccccaaaaaaaggaagaagaaaaaataatcttaaaatttgtattgaaccacagaatacctagaacagccaaagccaccctgagcaaaaagaacaaaactgggggaataacattaactgacttcaaatctatactacggagctgtagtaaccaaaacagcatggtactggcataaaaacagacatatagaccaatggaatagaatagagagcccggaaataaacccgtgcatctgcagtgaactcactttcaacaaaggtgccaagaatatacaatggggaaagaacaatctcttcaataaatggtgctgggaaaattggatattcataggcagaagaatgaaactagacccctctctcttgccatatagaaaaatctaatcaaaatggattaaaaacaaatctttaagactcaactatgaaactagtaaaaggaaaacattgaggaaattctccaggacaccggactgggcaaaaatttcttgagtgatatcctaaaagtacaggcagctaaaacaaaaatggacaaatgggattacatcatgttaaaatgcttctgcacagcaaacaaagcaataggcaaagtgaaaagacaacccacatactgggagaaaatatttgcaaactaaccgtctgacaaaggattaataaacaatatatgtggaactcaaacaactcaataggaaaaaaaatccaataatctaatttaaaaaatagagaaagtatctgaatagacatttctcagaagaagacaaagggaaaacagacatgtgaaaaggtgctcaacattattggtcatcagagacatgcaaatcaaaactacagtaagatatcatctcaccccaattaaaatggctttgtgggatggagtctcactctgtcgcccaggctggaatgcagtggcgagatctcggctcactgcgacctccgcctcctgggttcaagtgattctcctgcatcggcgtcccgaatagctgggatcacaggtgcctgccaccacacctggctaatttttttttttttttttttttttgagatggagtcttgctctgtcgcccaggttggagtgcaatggtgcaatcttggatcagtgcaacctccacctcccaggttccagcaattctcctgcctcagcctcccgagaagctgggattacaggtcccaccaccatgcctggctaatttttgtatttttagtagagacagtgtttcaccatgttggccaggctggtctcgaactcctgacctcaggtgatccacccgcctcggcctcccaaagtgttgtgattacgggcatgagtcactgtgcctggcctaaaatggcttttatccaaaagacaggcaataacaaatgctgttaaggatatggagaaagggggaccctcatatattgttgatgggaatgtaaattattacagccactatggagaacagtatggaggttcctcacaatacaaaaaaatagaactaccatatgatgcagcaatcccactgctagtatctacccaaaagaagggaagtaagcatagagctatctgcactctcatgtttattgcagtgctgttgacgatcgccaagacttggaagcaacctaagtgtccatcaacagatgaatggataaagaaaatgtggtacatatacacggtggaacactacccagccataaaaaagaatgagtctctgtcatttacaacaacatggatagaattggaggacattatattaagtgaaataatccaggcacagaaagtcaaactgcacaagttctcactcatttgtgggaggtaaaaattaaaacaattgaactgatggagatagagagtagaatgatggttaccagagcctggggatggtagtgaggaggtgaggggaagtatggatggttaatgggtacgaaagtatagttagaaagaatgaataacatctaggatttgctagcacaacagggtgactacagtcaacaataatatattgtacatttaaaaataactaaaagattataattggaatgctgggcttagtgcagatgagcaggtcggcgctggggcagctggtggagtgggtggcaggtgaaagtgacagcctcctgtccatgctgctcatctcctgcgccttcattctcagcctggtctgctttgccacaatagtaaccacctggcctagctgccagctggtgcaaaatgctcatcatatgttttctctcccattacattccttgggcatgccatacatttgggaaaagttaaattgaatttctagaaagtgcatatgagaagtatgggcatatgagaagtatggacctgtatgtagtttttctgtggtgagcaagacatttactcctggagagagatgagactgcactactttttttttttttttttttttgagacggagttttgccctttcagccaggctggagtgaagtagcatgatcttggctcactgcagcctccacctcctgggttcaagcgattctcctgcctcagcctcccaagtagctgggattataggcgcctgccaccacgcccggctaatttttgtatttttagtagagatggggttttaccatgttggccagtgtggtctcaaactcctgacctcatgtgatccacctgccttggtctcccaaagtgctaggattataggcctgagccactgcgtccagccgactgcaccactttttaatagtaaaaccaaagatgcagaagatgtctacagtcatctcaggacacctgcgtttgggaagggagttgaatgtgacatgcctaatccagcgttcttggggcaagagaaaatgttaaaaagtagccttaaagtagcccactttagacagcaagtttctataactgaaaaagaaaggaatactttcaagctggggagaaagcagagaaaaaaattgtgtgaagctctttctgagctcataatttgatagctagccatggtttacatggaaaggaaatcagaagtcaactcagtaagaggtggcacagctgtgcgcagatgtgagtggcggcttcaagcctttggcctggctgcggccacgttggctgcctctgcgtggttgcagaagcagctacaaagctcattgagagcacaactattgtctgtaaggcaacccagaaacacagaaaccagaagaaaaaatccaaggcattctccaaactttactggatactacagacaagggtgagcacctgttggcagatgaggaagtcacagggctgcttattagactgttctcagggcagcatacatcctcaactactggtgcctaaatgagctgctttgtagccagagatgaaacacttcatgaaaaatgttatttgaagcagaaaactgtccgtggagaggatctaccttctttaacttatgacctgctcaagattgaaactccccagcaatttaggaggccgaggcaggcagatcacctgatgaggttagaagttcaagaccagtctggccaacatgatgaaaccccgtctctaataaaaatacaaaattagccagacgtggtggcacgcacgtgtaatcccagctacatgggaagctgaggcaggagaatcgcggaggcagaggttgcagtgagccgagatcgcaccattgcactctagcctgggcaaacagagcaaaactccatcttaaaaaaaaaaaaaaaaaaagaaagattgaaacttatttaatcaccgtacagagaaagttaagacttagacttcctgtattgactatattgagaatggctaaactgcctcagagggtgtgataggacgtaccattcctgcaggccaccaaatgggtttatctctcactgtcaatcaaggatttcaagacacttgggtggagcttgtggatcctgatcagtgattacaggacatctcaacaggagagaagatggtcttggaggcgggcgtcatcatattgggaaaaattttgcccatgttcagatcaagacagtttggtccactctgtttcatttgtatgaatttgatttcattgatggatattttcccactgtaaattataaaaccgtggttcatcacacccctaaaaacccagttatcacatacaaatgaagatcaaaatgaaaaaggctacaaagaactaatatgtgaaacattaccgtaagctgaaaaatcactggaaaagaatgaaatttacaaaacaaacctcagtgtactgtcttttttagtgtaattttaaaagatagcttaagttaggatttcgatattttatttactgaatgctttcatcccatctaatggcattaacagacattttctaatagctttatgatggataattaacacatatgctttaaggaagtcgagctcattagtaaaaatgttgcttagggagatctaggtcatcggcagattttaaataacaatttctgtgtactgggatacctcagaggtattgcaggtttgccatcagaccactgcagtaaagggaatattgcagtaaagtgagtcacataaatttgttggtgttctcaaaaaaatagtttctggatttaatataagacgcacctccttatctcttcatagaactgaaaagagttagggccttgctctggattcggcgttggcttacgagagtgttgtggctgttctgatcttctacgcagaccattcaaactttctccatgtcagcaataaggctgttccattttcttatcatttgtgtgtccagtggagtagcacttttcgtttcctttgagaacttttcctttgcattcccaacttaactgttggatgcaaaaggcctcgcttttagcttaccctggctttcaacgtgccctcctcactaagcttaatcattcctagcttttgatttaaagtgagaagcatgctactcttccttacaatttaaggcacagaggcgattgcagggttattaattggcctaatttaaatatgttgtgtctcaggaaatggggaggcttgagcaggagggagagagatgggagaatggccggtcagtggagccgtcagaacacacatatttatccattaagttcactatcttatatgtttaggttcatggctccccaaaacaattacaatattaacatccaaggtcacggatcacaggtcaccataacagatgtaataagaatgaaaaagtttgaaatactgtaggaattgccaaaatgtgacaacagggactcagagtgagcctgtgctgttagaaaaatggcactgataaactcgttcgatgcagggctgccacaaaccttcagtttgtaaaatgcagtttctgtgatgtgcagtgaagtgaagctcagtaaaatgaggtgcggctgtaccaattttaagggcttacatagctcttggcaagtaagttcaggacattcaatcttttactaattccataagatgtagaaagcccatacttggaagctataggttattcatttatgtgagtaatttgtttgttggagggtggaagataagagggaagggaatacactcatgtttaaagccttggataaaaaagaatagtagtaaatgtattggaatgataatactcagcattgatgagtgatattgtagaaaaatatgtcctttgccattttaactggaagcactgtctatatgaaattgagagagatctatgaccgtgatttaataatcacatttccttaaaaataattatttatactaaagactgctcaagtcaatgtgatctaatcaataagtattacacattgatctgataatgtatgtatgtgagtccaacaagaccatatctgtgtgaaagtcagaaataaagtcctttggagatgaagcaaagagcacttaatgtttgtcattgactgtcactgatgttttggcatggtgaacttttttttttttttcgaggtaggatcttgctctgtagcccatgctagagtgcagtggcgtgataatggttcactgcagcctcgaccttccaggctcaagcagttctcatgcctcagcttccttagtagcttagactctaggcatgtgccaccacacctggctaattttttttttttttttttgagagagagtcttgctctgtcgcccaggctagagtgcagtggcgcgatcttggctcactgcaacctccacctcccaggttcaagcaattctcctgcctcagcctcccaagtagctgggactacaggcacgtgccacaacgcccagctaatttttgtatttttagtagagacagggtttcaccatgttggccaggctggtctcgaactcctgacctcaagtgatccacctgcctcagcctcccaaagtggtgggattacaggcgtgagccaccgtgcctggttcaaacttttcttaattcaggtgtcatacatctgattccctggaagcacagcctgagatagggactcttgtgtatcttagtctatttagtgttgctataaaggaatacctgagacagggtaacttataaagaaaggaggtttatttggctcatgattctactgccgagagattggtcatctagtgaaaacctcaggctgcttccacttatggtggaaggcagtgtgtgtgcagagatcacttggtgagaagaaacaagagggagaggggaggtgcctggctcttttataacagctgctatttggggaacaaatagactgagaaatcaccttccccacccctccccagggtattaaactattcttaagggatcctccctcatggccccaaacacctctctttaggcctccatccccaatattggaattcaatttcagtataaggtttggggaaagagacatccaaactatatatagcattgtgcaagtggcctgttgaaagaaagcttttaagagaaacctctaagtgagggagaaggatgaagttggacagagatgtgatttcaggaggagtctagcctcactcagcctgattccaaagggagtggggagccctggagggtgaatggcattgtagagtttgtcatgccagggatgagatgtctgaaagctgattggggatggggagcagccatctagatatctttgtggagacagcttcttttagtcatgttctctagagcagggtatgtgaatttatacctataggatattcttataaagtcattaaggtaatctgggcatctggtataccagagcacaagattatgaaccaggaacctagatgtattgttgagtcatttccttataaaagcgactgtgcatcaaatcacagagatttggacacatatagagtccataggaggtttttaaaaaattgatctcatggggagaagttggaaaggatttatctcaaaagaagcagaaaagaacttaatcacagtcttcaagtgcctgagggttgttaaagagtacatatttcggatgtcctggagaatgtttgattgtttgtttgttttttaaaatctctactgaggacagattagaaagaaatgaatttaaaaagcagctggagtggatttcggtttaatataatgtaaatgctctttatagtaagtactagtagaaattggaacattatgatatatctctccctaaaggtctccaagatggaataagcattactcttttaaagatggccatcattctaaaaaaatcatgtcatggacttcaactgtgagaaaacaatgagatttgggaacacaggatgtgagggaatgtttttgcttaagacacacacacacaccttaaaatgtcattattttataactcctggaattaatgtaaaacactacagatttgctttaatatacattctttaatgaaattacaaatggtcatgccttcatgaaattataattaaaccaaaacttctcgaaccaaagtggaatataaaaatgtaattataacaggtaattatccatgtaataacctgtgtaattacatgggtttttttttttcctgtgcagtgcacttaaaaaaaaaatagagagcttgttttgtaactttaaaacacttagagttgtgtaattaggataattaaaaaaaacagttgccaggtgcggcggctcacacctctaatctcagcactttgagaggccaaggcaggtggatcacttgagcccaggagttcgacaccaacctgggcatcatgatgaaacctcatctctacaaaaaatacaaaaaaattagctggatgtggtgccatgcccctgtagtcccagctactcgggaggctgagatgggaggattgcttgaatcagggagatcaaggttgcaatgagccgtgattgcactactgcactccagcctggacaacagagcgagaccctgttacagaaaacaaaccaaaaaaccagttaagtagcaaagtttgggtagggcacagaattaaaatctctttcagaagagcacacatagttttaggccccaaagtagatagcagagatgagcatacagcaggaaaaaaaaatcgtcatatatgattgactagttagaaatttgtacctgttttccttaaagctgaaagttatttagtggctcctaggagatgcagctaaggttggatataaacatggactagagacctgaagacataataatctcatgataatcccattttccaacgggcagatactctcaatcatacagggagaatgtagcatttcacaggccaatatatcaaaatggagagaacatcctagtgtataacataatgtaaagactggaacaatccaagtgtccctaatgtaatggaaatattaaagtgattaatacctctaatacccaaaagtttaaacatgtcaagttaatgtgaactttgagctttcttttctctgaaagcacaatggtaataataatagtattatactaactctattgctttgatacagtgtgctgagagttttgctgcattatcatagttaattctggtaacagctctgtaagacagatttatcgtcatgcctgttttccaggtggaggaaccgaaacatagaggggttaaataatttgtcctcaggcctcccagctggtatttggttctgcattcaagctcttactcaataatcaatactgcctacctcctcccacatacatgcagaaaagaatttcgcaggttgaaatcacagttgtgaaagtggctttttcctggagcaataactgtcattgtagtggcgctaccacatcctcaagctccagggcttcgggattgtccagtcaccatcacgtgggcaggcaggttcaattatttctgtttttaagttgcttggcacatggaacatgatttgatcactgtcttaaattcatatgtgcacactgctttgtaatagggtttgaatgcagtgacaattgttttgaaccccagagctcaatttctgtgtaacactctctcacatatgccattctgaaagatctcatcttgctaagttaaatttgctcacttatttgggaagtatagtaaaagacattataaaaaatttttaaaagtaaatctgctcactttgctatagcctttctttcctttctttctttcctcggagttttgctcttgtcgcccgggctggagtgcagtggtgcgatctcggctcaccgcaacctctgcctcccaggttcaagcgattctcctgcctcagcctcctgagtagctgggattacaggcatgtgccaccaagcccagctaatttttgtgtttttagtagagatggggtttcatcatcttggccaggctggtctcgaactcctgacctcaggtgatccacctctcttggcctcccaaggttctgggattacaggtgtgagctactgcgcctggcctgctataggatttcaattgtctttctgtgtttttcaaaaactagaaaccttgtttctgaacctaaacttttaatatctctaagatctcaatagagagaccatcctcaaaggtctccaataaccccatcacgtttgttaggtgataacatgggactagcaacttgaagccattttgaacaagacaaacatgtgattgttaaaaatctgtttcagggtcgggtatggtggctcacacctgtaaccccagcattttgggaggctgagggggtggaacacttgagcttaggattttgagaccagcctgggcaacatggcaaaaccccatctctacaaaaaaaaaaaaaaaatacaaaaattaggtgggcatggtggtgcatgcctgtagtccaagctacccgggatgctggggtgggatcgcttgagcctgggaggtcaaatctgcagtgagccatgattgcaccactgcattgtagcctgggtgacagagtagagaccctgtctcaacaacaacaacaaatatatatatatatatatatatatatatatatatatatatatatatatatatatatatgtatttgcttatatatatgtttttatatatatatttgttatatatatttgttttatatatatgtaaaaaacaaatatatatatataacacatatatatacacacacacacacacacacatatatatatatatatatgtgtatgtttcagggtttgaccccatttcactaaaatgtctgtagtctgtcattttctcttcctaaaaagggcatgcatgtttttgacttacacacttggaaaggtaattcagaggccaaattacagacaatttctttataatcaggctgaggaaacagaagttttgatgttggagggggaaagtgaaaattctttctggaacacaggatacaaagagtccattttgcctgttgatttgacttagatgaaaacccatagggcagggtacttgtcttcctcttggttttgggaaaggtgtctttggctggtacttagttaccaacactggcatgaagaaggtacccaaagtgatctctgtgctgcgtgagcacaagattatgaaccaggaacctagatgtattatttgagtcatttccctgtaaaaggtctggccagtgtctggccattctttccatttcagtatccatttcttcttgttacagctcaaggaatacgaggcccagcaccggcagtcggctgccctggaccctgctgactggccagatggttcttacccaacgtttgatggctcatcaaactgcaatgtgagtttatcatgtctttgacatcttgatcacctacgccgataagggacagtcttcaccattttagtctttgtatttcttttcgaaacttccgactcgcacctgggtctgcaaagaggtgtctgttcatatagattgcttattttctctacctgacagagactcatctacagtcaaaatagtgttatcatgctggggttttgttttttttttttttaattgcagtaaagtatacataagatgacatttaccatatcagctattttaaagtgttcagtgatactggtactgttaatgatattgatcattaagtacattcacattgctgtgcaaccagcatcataatttacttccagaagttcttcatcatttcaaaccgaaactctgttccaattaaacaataactctccctacgcccccgcctcacccacctccacacacaccctgcccctggcagccaccgttctactttctgcccctgtgaatttgacacctctcaatagctcatgtaagtggaattatacaatatttgtctttgtgtgtctggtttatttcactagcataattctttcagggttcatccacgctgcagcatgtatcagaacttcatccctttttatggataaataatattccactctatgtgtataccacattttgtttatccattcatctgttaatggacacttaggttgcttccagcttttagccattatgaacaatgctgctctgaacactggtgtacaagtatctctgagtctctgctttcagttcttttgcacatacctagcacatacctaggggtagaatttctggatcatgtagtaattctgtatttacctttttgaggaaccgccatatgttttctcacagtagctgtatcgttttaccttcctgccaacaatgtacaaaagttccaaattcttgcctttctcatcaacacttgttgttttacttttttgataataattatcctaatggtgtgaaatggtatctcgtgattttgatttgcatttccctcaagcatctttcacatgttcattggccatttgtgtatcatctttgtagaaatgtctgagtcttttgcctggtcttcagttatgttgttttgctgctgttgttagcttgcaggggttctttctattttctggatattaatcccttatcagatatgtgatttgtaaatatttcctcccactctgtgggatgccttttacctctcttgatagtgtccttgatgcacacacttttaaattttgaaatctagtgtgtctatttgtttttttgttgcctgtgcttttggtgtcatatccaaaaaatcattgccaaatctaatatcatgaagatgttgccctctggttttttctgagggtttcatagttttagcctttaagtttaggtttttgacctgttttgagttaatatttgtatatgatgaaatatatgggtccaacttcattcatttgcatgtggatatccagtttttccagaaccatttgttgaaaagactgtcctttcctcattttatggtcatggcatactttttgaaaattgattgatcatatatgtgatgatgtatttctgggctctctattttattccattggactatctctgtcattttgctagtacaatgctgttttgattaccatagctttatagtaagttttgaaattaggaagtatgacacctccgattttgttctagttttttaaggttgttttggctatttaaaggttccttgagattccacattaatcttagtttgagtttttctatttttgaaaaatatatcgttgggatattgatagggattgcattgaatctttagattgacttgggtaatatcattttaactatacgaaatcttccagtcaatgaacatagggtatctttccatttatttatgtcttcattaatttctttcagcagtgttttgcagttttcagtatataagtcttgcttccttaattaagtttatttctaagtattttattctttttgatgttattgtaagtgacaatgctttttaaatttttttcaaattgttcattgctagtgtataaaaatgcagtggattttcatgcattgatattctatcctgtcactttgctgaatttattagctatataggctgtgtgtgtgtgtgtgtgtgtgtgtgtgtgtgtgtgtatagtgttagggttttctatatataagatcatgtcttcaggaggctgaggtgggaggattgcttgagcccagaaggccaaggctgcagtaagctgtgattgtaccactgcactccatcctgtctttaaaaaaaaaaaaaaaaaaaacaagaaaacaagatcatgtcttctgcaaaaaataataataataataataataatttaactttttcctttccatcttacgtaccttgtattattcacactgtttcaatatgaccaaaacagtgcttcttattctacaagttccatagggatgataggaatgaaggctccagaatttcatataggcttttttttttgataagagtattgctctgtcacccaggctggagtacagtggcgcgatctcagctcactgcaacctccacctcccaggttccagtgattctcctgcctcagcctcccgagtagttaggactcaaggtgtgcactcccgcactcagctaagttttgtattttttagtagagacagggtttcaccatattggccaggctggtctcgaactcctgaccttgtgatccacccacctcgggctcccaaaatgctgagattacaggcatgagccactgcgcctggcctcatacaaacattgtagggtgccatcttcacaatgtgtggagcagaaacagaaggaattacctcttttcacgtattatatagttgtgttttgttttttaggttatctcatccttaaaatttggaaactaccccatctccctgtcttcagtctcttgtcttttcctatctatgttccatacaaccagtcatctttgtaaaacatccctctgttcttgcagttatgttttgaaaacgctgatggttttccatttctataagataaattccacccttcttggcacacttaaaattctatgtgatctggctttaatcaatttcttaaatctcatattctatctccacacccaatagcctatacaccagacatattggaccccatatgcatgactgaacaaaccttgtatttttcattcttctgccctttaactcacataattttctttatctaaaatgttttcctccaaaattttcctggtaaaaatctgagtttttcaaggtggagtccaactgttccttgctctctgaaactttccttcccgtcctcaagcgtatttattgctacctattatgtgcttttgttaaactggctttatagatcaaacttaaagaattatcctagaatatcaaaattggttgtacatatttcagcctccttggaaatagtgacccccttgggcaagaaagactgtattctttgtctctccaatgtccagctcctatagaaatatttcaagaagagcattgtatttgaacattcattcttttttgttgttgttgttgagacggagtctcactccgtcgctcaggctggagtgcagcggcatgatctcggctcactgcaacttctgcctcctgggttcaagcaattgtcctgcctcagtgtcccgattagctgggattataggcatgcgccacgacgccaagctaatttttctatttttagtagagatggggtttcaccatgttgaccaggttggtctcgaacctctgacctcaggtgattcacccgcctcggcctaccaaagtactgggattacaggcgtgagccaccgcacctggcctgaacattcattcttcctggctgccttaagagcatgttttatgtcttgcaactacagattcagtctttacctttttttctatctaagcaacaaatggcagtttatcagaaataaatataatcctcccatcatctcccaatttcctgaatcaagcaccagatttccactgcagctaaaaaacaaaggattatgaatctgaaagccctgcctggtttacttttgtgtgaaagtgactgagacattaccgtttataataataaatgtgtcataggccagccagcagtgtgtcccgggacgatgaggtaatcaaaagagccgtgtccatggttatcaatgtgcctttttgggtctctaatcctcaagtcctgaagtctaacataatatagatgtaaatcacgaacctaaaggatcatgagaaataaatacagtaactcaggactgattcaaacccaacttgggggagaaaacaaagacccagttgtccataccgggtcccttagtatcagacccactgtatactgccctgattaatagcatctgagtcaagggagaggttagaagactttgtccattcagagaaacaggactgtagtaaaacctcacacacttagacttcaaagagagaagcttgttttgtttaggaaaaagttaatataagtattatcaagcatttagaacaagctgctaagaaagcattattaagcattggtttatgagacccctttcagagggctggtcagaaccattagctagatataaattgtgagaatgaaatgggttcttcttaatagttggaacatttcattctcttcagcatttctttattcatttgggagacgtttatggagcccttgctatatagcaggcattgtgctagatgtttgagttataaaagtaaaggagaaagagaaaggtccttttctgacagtttatgctgtagagcagaggttaaaatcacatccatgtggcagggcacagtggctcacacctgtaatcccagcactttgggaggctgaggcaggcggattacctgaggtcaggagttcaagaccatccaggccaacatggtgaaacccggtctctacaaaaatacaatagaaaattagccagatgtggtggtctgtgcctatagtcccagctacttgggaggctgaggcaaggaaatcttttgaacccaggaggcggaggttgcagtgagccaagatcacaggactgcactccagcctgggcaatagagcaagactctgtctcataaaatataaataaataaataaataaataaataaataaataaataaataaataaaatcacactcgtgtatgcacacagatttgagatgccatatacacatttgcattactaacttcttaccaaactatttcttcatagatggcccgcaaataaattcagcctgtcttagttagacctagggccagaaataccatatgcttcctcctctcagagcacggtcttccagaagttctgaagagtgacttctcttttggctgagaggcgtaggtgatgataggctagtcagcaatgcagttttttgaagcagttgatttactctgtgtattttgctagctgactttctgccaacacccatgcccacctctggtcatgctgttcagagctacaacccaccaccatcaccactgaagtttgcttgaacttgattgtaatcctaaggtatatatatgacccttgcccctcttactctggctttagcctgttctgcatttttatgaagagttggccagaaaccccatccaaaatattcattctcattattttagattttcctctgtggcagagcagttaatttcagaattcagccaccacgggttataggcgctttgaatattttttgtgcaagagccggagcttttctgttttctatcgattcctttctagaatacagagatgtgaatagcccactggctcgaatcaggaatgcccaggccatgaaagttttagggatcacaaggcctttgtcaccagacctcaatgcctatattgatgcctgtcatgccttaggatttcatttgcattgatttcataggcttccccaccccaatcgctgaaattagataatcgcgtgttgcctcacaataaatccatatgcacattcctagtttccaagagtgtaaagtactaaagatagttaccaggggaagtgaaaaatagatttccctttgccagagaagaatctgttttgtgctgttttccattaataataaacttctgttgggagtgctaaaagttttaaaagagatttttggttgagagcttagctcgatttcttattaaatgtctgcacatttatttattatttttcattttaatttagtttggtaagtttattttttcctttgcctcctgcagggaggggtgattgtaagagttctcaagctttgtgccctaagattcagtttattttctagttaagaagacatttaaagaaattatgatctctgttttaccgggttttctagttttttgctaatgtaagttgtaaatcatggtttttctgtttttagaaagctggtgggtaagagttagtgatctatacctggtacttgaatattaacaaaaatgtttgctgtgaaagatctttccaaatgaaaggtcatttgatggcaatcttatttaaaattttttaagaatatatataatgtatgaagaaaaatgaaagcaacaaccatgacaacaaagcacaagatgggctagagtcatctttaccgttcagtagatttttcacttcatagcaaaatgtgttccaggaaaagctggaattgtgtttctgtagctggagttccttaccaggatggaggacctctagggaaatgttgttttgagtgagtaaagcaagtcatcgtttcataactgatcacttttgcttttggggagttttagagttgggaaatatttgtgcaaagaatgttatacaggaggctgaggcaggagagtcgcttgaacccgggaggtagaggttgcagtgagccgagatcacgccactgctctccagcctggcgacagaacaagactccgtctcaaaaaaacaaaaaacaaaaacaaaaacaaaaaaagaatgttataactgtgggcttgtggccttataacaccaccttacctccatgtgtgcactcttcatagccttccattcaaccatatgtacatttttgtcactaatttggtttgaggtagagagagccatgtggttgaactgtgtccaaaactttgggccacagacacagaatgccgtggagctattttcaatgtttccttgattgaggacttccaaggtctcaactaaaatatccccagattataagatcttttagttggcaccttttaaatctttttgggactttctaaaattgtaaaccataaacatgtgcctctccagtggccaggttttacttagagttttcaatgtcctttcaccagcctcaataacagacattgtcttcaagccagaggatttagtttcgaagttttggaaggaaaggtagtcacagccctagtcgaaatagaacattctgaaagataatttgctaataacaattctggtatgtgccgaaagccagggcaccggcagaagttccttttaagtggttcttgtggcaaatggcttaatttccattatgacacaagaaaaggttaacagtgtaatccctttttatagaatatggcggaagaacagtgcacacactcataaggtggcctgagcagttgtgatttcactgctttttggagcagagtggcagcatccttctacttgtataaccactgtcgtcttttatagaatctgctattgtgagctcaactcaaaattttaaaggttgactattcttgctgtgtttattttgaattttattttattttattttttactagagtaacttttagacactaggttaaaatttaccagatgttttatttttacatttcaaaggtgttaacatataaacctatatcattagcttcatcatgtggaaaagtctgaccgcaaagatttctttaatggcagcatatgatgaatttacaaaatctgctcccacctataaatattcccagcaatctaaaaaaatgtgtacaatttttatagttttgctgacttggatggcagtgaatattgattagatgcataaattatgtgaagagtgacacatactgtagtacttcagtcggcgttgtaggtccggtgaaagtatccccaagaaaatgatggattttatttctactgtctttgtcttcttgtaattattcatttattttttgagaaggagtctcattctgtcacccaggctggagtgcagtggcacgatctcggccctctgcaacctccacctcctgggttcacgcgattctcctgcctcagcctccagagtagctgggattacaggcgcacgccatcacgcctggctaattttttttttttttttgtattttttagtagagacagggtttcaccatgttggccaggctgttgtcgaactcctgacctcaggtgatccgcctgcctcggcctcccaaagtgctggaattataggcgtgtttgataaggaagtttaagagaggatagattccaagtataaaaataactttcatttctgaataagcgttttgctttttaatggtgtttacttttttttccactgcatctcttttcctaagggatcttttcataactctgagtgtgtgggtttaaatttaaaagggttctaattggcaagatgctttttggtttacagctagaaaatggttctacttattaaagctctaatagttgtcttaggctcatgttcttcagttctttatttctcacacagaagagtttacttgtttgacttgtaatatgaccaggagaaagaagaaacaaaacatagcaataatttatcagaaggcatttatgccctgtatccttgggataggtatcagcaattctgtatacgatgcatgcagtattaccttgtgtagatgaacccttttcaaaaatctttctacatgtaactatgttaaaattaacttttattggctgggtgtggtggcccatgcctgtaatgccagcactttgggacgctgaggcaggaggatcacttgaggccagaagttcaagaccagcatgggatctacataaaataaaaaagttagccgggcatggtggcacacgcctgtagtcccagctactcagaaggctgagtcgggaggatttcttgagcccaagaggccgaaactgcagtgagctatgattgtaccactgcactccagcctaggtgacagagcgagaccctgtctcaaaaaaaagaaaaaaaaaaagtaaattttttaaaaatataaaataatgtatactgatcttagtcttttaatgtgtttgagaccttcatatgattattctgatttttatggataattcttataaattttcattttatttcgctgggtaggagattataggaggaagtattactctgtattttaataaaaccatgattctgaaactaaaatgatagtaaaataagaatatattaaagttcttactaaaagagtaaaagtaataattcctttaatctacagcttagggtgagactaaaggaaaaatcagtccattggaaaaatatacatagtgagaggttttgagaaatgcccgttttgttccgtctggttataagctgcccaggagccattgcttaggtggcttcttgtcacttcttctcttctgccctcccattcccagtcttttctctgggacaggggccaaagttttcaggcatgtatttgttgagtccctaagatcaccatgtttccacaaagttacacaagaaggaagctgttgcctctactaggccctggaaaccaggccttcaccctgcgtgggcaagagaggagactggttaagctcagacttgagtcagacctggggctcagatccaaatctcccacctattagctctgtatctgtggccaggcacttcatctctttgttatttgatgtgaagatcttctgcccttcccgtcaactgtcattcttaaaatacttgagttcccataaaagtgctatttttgtacatgccattaacatggtagtaatggcttatattcatgtatcagcagataggctagaattgtcagaacaaacttaatgtaaaagtgcatacttggttacacttttaccaaacacataatcaatttattttctatttcagaaggcattattgtgtaagtgggtttaagggtgggtctggtatgattttagtaagcatgtttggacttagtactgtctgtgaagtgtaagtagttattgtactgaaataatctagggccctacagtgctgatgacgtcgtctcatggagtgtgtgggtgtgtgttccatacctgttatgtcggaaggcactctcatggcaggcccatttggctctttgactttgggaactaaccaggcacatctttatcattactgatttctgcagtttcaggaagttgagggtgcttgctgcttggaggccttcctcgacatatcaaaggctggctgggcgtggtggctcacacctgtaatcccagctttttgggaggccaaggtgggtggattgcctgagctcaggagttctagaccagcccggccaacatggtgaaacctcatctctacaaaaacaaacaaacaaaaaaaaaaaaacaaaaaaaacaaatttagctgggcatagtagtgtgcatctgtagtcccagctacttgtggggctgaggcgggaggattgcctgaacgaggctgtagtgagctgtgttcatgccactgcactccagcctgggtggcagagcaagaacctgtctctaaaaaagaaaaaaaaaagaaaaagaaaaacatatcaagggccacattgataaaaacaaatgacaaaataacccagatactatataatctgaggatacctatttttaaaaaattaatttaagatagattacggatacaatttggtctgtttctttcatttggttgaaccttgtggaactcgagatactagacagcttttgacctataaaagtggtgatttcctttgtccaacctaatacatacataccacagaggatatgccacatttcccctgctagctgattatatttcagtacagatatttgtaatctaatttggtttagagattggcatttcagtttgcaatcccagttttttattgtgctcttgggaacaacgctggggaagttggggataagaggatttccattacttgttcaatgttactgattgattacatgtcaattccttgttaaatcatttgccctagcgccggtccttatttaatggatgggttggggagatacccaggcactattgttattcgtaagtagaatttagactgcgggccatctccaacctaagcctgcttattagaatcataggttgcccttcacttgttttgagtccatttgaatgttgtcacaattacccattgtatcaaaattcttttttttgtttttttttttttttttggagatggagtctcactctgtcgcccaagctggagtgcagtggcactatctcggctcactgcaacaaaattcttagaacgatagtcagtcatgagacaaatcatttggaaagcaatattttaacacaaccaaatttttttacaatataatttctatcaaaatatccttttattctcttctctatgccgttcatctccctctttgtaccacaccacactactaactttctaatgttcactctaatatttattattagtattatgctaatagcatcacataattagtttataaaaggatgcaaatctcttcttacactgagcatttgaaccaaagtgtaggttgaaacaatgccatcttgagcattctttcatttatttatgtgcaagcatttattgagtacccactatgtgccagtccttgtacacagggagcttgggtttgagaaaaggattagattaatagatggcgtggttgtggacttcattgagattttcctgcctattgtgataggtgcacacagaaagtccagcaagccccagcaaagagggtctgggagccttcccagagaaggtggttgacactgaggaagagctttccaggagaaggagaaatgtgtgtcaggagaggcagcagcaaagtcagaggtctagatgaagagctgagtaaatcggaaaacttgggtaatatgagaaaattaggtcaagtaatatgaagcatttctctctctcagtattttgacttctagggtatagattctattctttacttatttttatttataaattggttctgtaataggttgtttccttatttctgcaaactttaaatttatataatttatgttttttatcttgtctttgaggtctcatttaattgaattcacgttcttattaaattattttatagagagaagcaactattaggaatttcttcctgttccttgagttgagatgatgaagtgatgagagcaaagattggctttttgtttttatctatgcttcttcttttccccctctctttgccgtagtttgtttgtatagttgtcatgtccttggtcctgtttgggtggctctgatcacgttctccatttgtgctgatattgagggttatgttttgacctgtttgccatgctatctgacaatagattttttttttttttctcctttcaagatacagttgagggcttcattttgtggtccatttatgtttgttgttgctacaacctggccatgatatatggtgaaatgtggtcttcattgggatagctggactctgccttttctctcctgaaactgtgttgaatgtgccgtatcgtaattgatgccacctggttcatagctggggtaattggtagaacatagccattctgcctttcattcattttttgaattttagagactgtatttcaatcaagaacaacctcacttgactttccatcgtttcactcattgctcttctgtagccatttccactgctgttaggtcagaaaaagataaagaggtcacacagtttccttccagatttggagtcacatgaaaggattctgtggattcctgccagcctggcttttgtagaagttgtgggccttttccagtgggcctcagaaatttgtttcttaccttagtcatggagtttagtacattagattatgtagctttctctctttggttgctcttggcgcaatatttttgctagtttttagtgttttattgtttgtttgtttgtttgttttttcttcttggggggcttttgctcattttgttagtcgttgtgagaagaatattctgtggttcagtgttcagcagagttcatgacctgattgttttgccaattggatgaccacaaagaacctttctagctctaaataattcctctctgaaggtatttagtctagatttcttcaatttggaacttgaagtaaatttgcttatttattctgcaaacagaaggagattaacgttaaggttgtagatcgtcagtctaggaggtaacattggaccctcctgcctccagcttcgacagatgaccactgacctggtggcataagtttggcttggaggaatggtcttggtggtcccaccttccctccattgccatttggctccatcagttctctgtatttctacattgccatttgcctagacaaggttgtttggcagccctgtcggagaagtcatcgtgcctgatacatgagtcattcagcctaagatgccataaaagtaatgtgactttgcaaacaccacccaatcccttaggagacttacggcttctgggatgaacactttcatcagctccagaaactagcgccttaaatgcgtatgtaattgccctacttggcagtcctgttctgaatcatcctttttccatggcatgtgagaattggatgcccttgggaatgagtgggtttggtgttttgctttagtcttcagtgtgtctgatcccatagatttgctctggataacactaccccactctgaacagagggacctgtagagctgtagattaccttcccaacactttgtttcctaactcacctatttaatatgaaacaatacgtttctctgacctatggtcagggtgacaaagccccaggcagaaatgtcttccaaagatttacagagtgaaggagaagccagtcctctcgcctctacttaccactctctccccccacccattcaggaggaaaggcattctctgctctgtggcaacctgcagaattggggtgggaggattcacttttgttttatgtctccctagatctggctgtaggactcctgagattttgtatttttctcccttctcctcatgggggcgattaaaaacgattcaaagttcatgagtttaagaaatagattgcagttgattagggaacataacatccatttgctgctcctttggttttatggttaaattttaaagcagtttcttaagtgaattaagtgctgacaagcctttgccccaaaggaatggtaatattacctcaaattctcacatactttttccaaataaaactatcatgtaattatcttcttctctctgccgccgcctcctcctccgtctctttcttcaaatctggcaacaactagttaattttgaaactgccagagagattatttcagtgttccactgtacctctgggagaagaatggaatctcatctttttttttccatatgctaaccaaaatctcctaatttcagagggcaatgatgtcaccagctaatgagcaaaatatttcttactaaacagatgagtcctcccctgactcctttgtgataaaagaaaaaaaaaacttacccacagtgtgtttcatattttctactgttacttctagcaactcataaacacactttcaagtaactctaacttatttgaacagtgagactaatttttttctaaatacgaagaataacacattaacctgatgactgtgaccaaaaggcctctgccacggccccagagtcagtgcagtgcccctgaggtagggagggactttcggtgcttcactttttggaccgtggagggagatcaggcagttggagagattatgaaatcaagcttggggaagaggagggccgggaagctcctgttgactggtgtcacatgctgtttataaaagcaacaacatcagctgagctcttctttgtctagataggagggcatctaaggttgggatggggtgggtgggagaagtagggccccagggccatgtaaatactggactaggctcatgtagggacatggaaatatccctaaacccatggcagtttcctcttcccctcacggaagtgtgcctcaatttccttacccagagatgagtcttcccacatcggaattcctatatctctgtgtttttctcttgcggttgtcgcggttgaccttaacattaatcatatttctgaacttctcttggggctgtccctaccctcagacgtctagatgataacctttataaacccagggaatgctggcttcctcctattgctattccttgcctttcctaatgccttgaatcagtgcattcattcatttgttcatttcaatcaggaaatatctgtttagcacaaacatagatatttatttatctaagtggaaaagaatattgtaattctcagtgttggtaactgctcctgagattttaaaacgatacaacattttttcagagcaagttgttgatatgtatcaaaagtcctaaagacacacccttttacccgtcaattctacagtcgagtcatctttctaaaaaaaaaaagaatgtgttagacatgttagaaattttaccacaaagtgtgcatccaaggattatttgaaaaattggaaacaggcaaatgtctaattacgggggaccatgatatcagtaaattatggtatactttgatggctaaatactactgcatcattaatacattgtattgtattgactatttcttgacatgcgaaaatattcaaaacatacagctttaaaaaatgggctatgaaacagtgtggctacggtgcacaccaggggcctggggtttctctaaaggaaaatcttttgaggcagccgtgacccagagaaggtccccacttacaggcaaatgtgttatttctacttagactgtgcgtgtgcatttgagggaggatttggggacactgatagtgactagaggagttggaggaggtaaagatcaaagataaccctttcttgtaaaaaaaaaaaaaagaaacatacagaaacatcagggtgtattttgtgtgtgcatgtgcatatgtgtgtgtatggggaaaaagtgggaaggcataaaccaaaatattaccaagttttctgagtatgggatgatacgtcatttctcttactactttgtgcatttttgcattctccaaatttttaataatatatgtcatgtgtagtcagaaacaataaatgctactaacatacagatgtggaaatgaatatggtcatgtacattgtctgcatgacagttagtgatgggctagggaatctagcaatgccaatatatgtgtgaagtccttggataaagtatctttagtctaaggtagatgaggagcaaagccaggagagctttccagaggaggcaatatgcagactgaaacttgaaggatgcataggagttaggggtgtggatgcaatcagcagagctgtttgcagaagatgagccatcagggcagtgatgggcatggggtgtttgagatgctgcaaggaagcagggggtgagaccgggtgctctggtgccctttctaccacgtggtatctgaagagtggagcacaatgtaccagaaactgaatctgaccgcacacagtcacatattccactataaggcctttggaccttgttccaaggagctaatgaggaccaattcctcaccataggagtcaaatactgaagtcccttctcagcaaatttgcacatctactgtgttcaagcccgccacccagagaacaggaccagcagtggccttccctcacaaagtctatctcccaatctgtccctcaccagggagcttcctagggtggcctggctcagtctagtcttccaaatatcccccagtttactctgacacatggccagggctgagagccacagggctggggagtctcaacttcttcattccacagtgatcgcaccagtatttatgggtgggcactaggaatgcaaggagcaggagatcagacaaggctcctggcccggggagcctcctgttttctgaaagtcaagccatggtacgtcctcacaaagggcccaacatcgagtatcttgataaatacctgaatgactccctgagaggcgtggcagtgaggttaaaaaggggtggacaaggtcggctctctctcccatcctcttaggacactctccaagtcctgtgctgtgaggagaggccgctcaggggaagtactggggatgtatccttcccgccaccctccccaaagtatctggataaatcagtgcatgaacttcatgtgtatttcacatggaacgagggcttccttacctgccaagctctagacttcacattcaaggtctcattttatcctctagagagccctaggaggcttctcactgcctatcttagaaatgagagaagaaacatgcccacagccacaggctcttcccatgtggcacagaggggatctgaacctgcattggctcagagtcttctctatatctgaacagcctgtccagaaccagcctcagatgctggccatatgacaagctttcacacgtaaaaaggttgttggttttttctgtttttgttttttgagatggagtcttgctctgtcacccaggctggagtgcagtggcacgatttcggctcagtgcagccactgcctcccaggttcaagcgattcttgtgtctcagcctcctgagtagctgggattacagatgtgcactatgcctgactaatttttgtatttttagtagagaccatgtttcaccatgttggccaggctggtcttgaactcctggcctcaagtgatctgcctgccttggcctcccaaagtgctgggattacaggcatgagccactgtgcctggctggttgttgggtttttttgttgttgtttttttttttcttttttctttttggagatagagtgtcgctctgtcacccaggcgtgcagtggcatgatctcagctcactgcaacctctgcctcccaggttcaagcaattctcctgcttcagccccctgggtagctgggattacaggcatgtgccaccacacatggctaatttctgtatttttagtagagacggggtttcaccatgttgttcaggctggtctcgaactcctgacctcgtgatccgcccaccttggcttcccaaagtgctgggattacaggtgtgagccaccgcgcccagctaatttctgtatttttagtagagacggggtttcactgtgttagccaggatggtctcgatctcctgagctcgtgatctgcccacctcggcctcccaaagtgctgggattacaggcgtgagccaccacgcccggcctggttgttgggtttttaagtggtctttgctatttacacagcacctaaaagaacagtttgtgaaaattaggtgttatttgaactccagtgagttatgaatagaagactgcagagttaataataaggctgggcttggtggctcacgcctgtagtcccagcactttgggaggccaaggcaggcagatcatctgaggttaggagttttgagactagcctggccaacatggtgaaaccccatctctactaaaaatacaaaaattagctgggcatactggcgggtgcctgtaatcccagctacttgggagactgaggcaggaggattgcttgaacccgggaggtggaggttgcagtgagctgagaccaagccattgtactccagcctgggcaacagagcaaaactccatctcaaataataatattaatagtaatagtaaaaatattaagtccttattgaactccagttcagtaaggatttcaggtacgcagtatttaatacaaccacaacgtaagaaaagtgctactataccacatttatgtgcaggaatattaagacccataaaagtaaagtgatttgctagagaacttggtaattaaacccaggtttttctaacccctgagaccttgggctaatcctcttccctttaccccagtctcactggggcactctcattttcttcgtttttatcctgtaacgaaggaatttggtggaaaatgtctacactcagttttaaggaactgtgagcataactttgcagcatagttgtcagtcttggatgaagaaaggtcttgttgaggtagggtagtggcacaggagcaaaaccatacagtctcagattctgcccctgccattgctgtgaaatggggtctgtatgcaaatgtttagcacagtgcctgggaatgctaagctttggacaaatacaagtgttggaagtacaacatcgcaaaagcacctggtccgtcagatggtggcaggggaaggggagtttgtgggagaatcagtttgtgaaatggggaattgggcagtgtagggaaggtgtggtgaacccttgcaggagaaagaagaggaaattcaataaaggttgggaggagatacttctgagcagaagacagagtgggagaagggagtttaattcttggcaaggagtgagagacgccagcccgcccagggaagaagagcaggacaagagccgaggaaaaggggatggagctctggtgatctgatgcagaacccgcaatgtgtgcgtggtaaaacatgaccctccacttgggagcttcgtattccaattcccttttgttgttgttgttgttgttgttgttgtttgagatggagtctcgctctgtcgcccaagctggagtgcagtcaggcgatcttggctcactgcagcctctgcctcccggactcaatttatcctcctatcccagcctcctgagtagctgggattaccggtgtatgccaccacgcctgactaagttttgtagttttagtagagacgggttttcaccatgtttcccaggctggtctcgaactcctggcctcaagtgatctgcccgcctccgttggaattacaggcgtgagccactgtgcctggccgtttttagtttaggtaacctctgaatcctgtccaactctaaacttctgccattttaaggagggacagtggttcctacgcatccctgagtcctgtgtagctaggtattttatgtcgtgtgatgtcctataaagagcattatacatgaagactcacccaacaggagggacatctagaaacaagcaactcacattgtgctgtgagaataaatgacttacccaagtgaatgaacttagccctgaaaagacaaacgtgacttgcagcccacgtcatggagactttgtgtgggtttttagtcctgtgttgtttagatgatgttctttttaagtaacagcatgtgcctagtggctcccctgaggtccttgagaaaattaaataatcatcttgtgacacggtcctcatgctcacgtttctagaatgcaggagaactcggatgctctgaaatgggcattaaaacaatttgttaagagagctttagaagcaccaatgaaggggaaatatcctacatttaccctggttgttaaaattttaaaaaggaatggggagagagagagaaagtgacaactctaggagaaaaccacaatcataagttttaattcagtaatttcaaaaatagccattggaaggtgtctattttcaattgagactgctcccttaagggggtgttcagaagaatgtctgaaaaagagatctttttttaagttcagtcacttttaagggttagtccttgtcctccttgtcctggatttgctcagattctcgcgttcttttttctgtctctggaattccatagacagtaattaaggaactggaggccagcaggaggtcagggagccttcctcagtgaaaacagggattgttggccatgcacaacactcccttttttccttgtggtgaataggagatttgcttagagctgatgacttatgcctttcttgcgagttatgcagttagcaagcgactggggaatcagtcagcaagcagaaagaagctaattgaatccagtgtcttcccctttctccttcggatactgagctgtgacggtggagcctgcctgatcatgtaactccagagagacatgttccaggagtgcctaatcttaattttgagattgcggagtttgatgctacaagagtgaagacgctctccgagtggggaggggggtgggaggtacaggacgtcttcagaattaccccttaggcttgctaaatgccgaagccggtaagtcactgaatgcgttcaatgggaaagaaagaatgtgttttctgttgcttcaagtaaaagtttttgctgctcctgcctatgatgtttctctctcttttcttcttaaattcctctagatttgtccttcttcgcctgtttacttccctacctggtaaccctgagcatttttgcctggcattttcaccagtgaaaatgcgtaacttttagagaatagtgagtattgttttgagaatttgagacaatgagcatatatggctcagctgtgaattgtggaggcttttcctggggaggacttgaattcagacagtgttgcacattgcttttcataagcttatatctgattggcttccttctcttaagtttaagattaacgctgtgacacagccgacctagaaagctgaagtatgtatgtctaatcatgcgctaggttagagagaccagtgtgtgaatttcacaggcaagtacatttccagtttcaaattgcttttcagaaatgtttaaatatctctcggtgttacgtggcgctgggggagatgagtgggcttagtctgggtgttaattgtgacagcgtgtcgtgtgtttcgagctagggaaacaagctgagtgaaagtgcttctgcagagggcacagttgtaatcctgtgatcagcgtggtggtctcaagcggtcctccaaagggtctagttgctccttgcaaattggttttaacctttattacagcatattgccattgtgcttgcacaactgtgccatatggcttttggaaaggatttgttctgcacactgcagtcccaagaactgtttgttacagggtccggtgaagtatctgttaccgaccagcagtgacaggtttacttggagcagggagaggatgcatttagtgagctccggcacacaaatgtttgtactcacagatgctattcattttgttccttttttctgatcatccagcgtgtagctgtgttataaaaagttctccacgctggctccatgtctttcctattagaacattgcagatgtgtcaaggatgcacttgttccaaaagaagctgggaaggaaggaggctccaccctcctccgggtgccagacgggccccataggttcctcattcagtggcctggccggcaaatggtgtgctatctctttaaagcagctatagttttgtgtcttggcttggtcaatttgttatggtttaaaactgtggagccagctgtctgcaatctgatgtaatgttgctatggaaaccagaaatgaaacacttaagcattcaccacagaattactacatatagcattagccaaagtaattaaaagttgagccatatgggctttctgctggaaaaaaatctgcagaggagaggctggaaatcaaatgtttctgtttacaatattggaaatccacttttccacaatttttggtgggataagttgcctttttctcttgaaggttttctggtgaggagctgtcatacagatgattgagttcaccttctcactgagaagatgatctgtttaactctgacccagggtgggacaagggaggggaggccacactatctcatgtttgaatgtgtgtgaatatatacttttattttttaactttagtttaaaacctgttctataacagtgctgaacctatttcttagaatcagtcatttattttatatacaatgcagatttcctctatcttctacgaagtttttcacataggaagatttcttttaaaatatacatagtatttgaatttaaaaattatatattttttatgtttataaatataaaaattctcaagcccccatccctggtggtgtatttcctgaataaaaagacatgctggccagccatggtggttcatgcctgtaatcccagcactttgagaggctgaggcgggcagattacctgagagtcaggagttcaagaccagcctggccaacatggcgaaatgccatctctacaaaaatacaaaaattagctgggtatggtggtgtgtgcctgtaatcccagctactcgggaggctgaggctggagaatcgcttgaactcaggacgcagaggttgcagtgagctgagatcgcaccactgcaccccagcctgggagacagagcgagactccatctcaaaaaaaaaaaaaaaaaagaaagacatgctgtgttattttcagcatttgggaagtggaatatacttaaaaagagaaatatgacatgaggaattcaagatttactctccagtttagaagaaatgcaagccttttacagcgtttttgtgttaaaacagctggagagaattttttaaaggcaaatatttcacaacgcttttttcctctggactcagtaggaagtgagaagtcaacacctctccatcaatatcatggatgcagcaatacattcttgggataggttgttgaactcaagtaacttctaggctgacttctaggttaattttctattacacacacacacacacacacacacacacacacacacacacacacacacaccttggatgacctggattttatattgcatttttcttcgtataaattgtgccgcatctatcttgtctagcgtccaaaaaatgatcatggaaaagaaggacttggttgccatggtttgtgatttgtcagtgacaaacacctccaaatcttgatttttctagaaaaataaaaatagcattaattcaaaggtacaaagaagtataattcaaaggtataattcaaaggtgtgtttctcaaaaataaatggaacatgtgaaaacaattaaataagtacctggaatatgttactttttgccacagtgaatctgggcagaggaaagtaggattttatgaggaaggcattgcctttaaatctactgtccttgtttaactattttgatttctccttggaaagttcactctagtacatataatgatttgtgtctttgtggactaaaatttttgtattagttttttctataccccatttctcttactgcccactgtcccatgcatacacacacccacaccaccaccaccaaccagcaaactaggtatgaggtatacacatcagtaattttcatcctgtaacacagcttcttgtattttgattacaaacaatctgtacctatttcattttcatttgatttcaacatttatttatttatttatttatttatttttttgagacagagtctcgctctgtcgcccaggctggagtgcagtggcacgatcccggctccctgcaagctccgcctcctgggttcacgccattcttctgcctcagcctcctgagtagctgggactacaggcacccgccaccacgcccagctaattttttgtatttttagtagagacggggtttcaccgtgttagccgggatggtctcaatcacctgacctcgtgatcctcccacctcggcctcccaaagtgctgatttcaacatttttaaatgtgaggattagagacatattctaggtttgtcccgttgatagttatagagactttctataacataatgttgattcttcttctattagaattgcttggcttttgagctacatcaagagagcagaatgtttttaaatgtttatatgtaattccatgaactgtgggtttttcaggtgcttgttacccagaatgagggttaaccaagttctcattcctctggttgaccgctccaaccatttcatcacatgtcaacaatccaaccaagtagaaatgaaactcaaaccagacaaaaccattttgtattatgaactacacttattattctaattttttatatttttagttttaagcctaattgtcagcatccagtgtagcctgtccccaccgttacctgggagtccagttcccattctttattactaggtaaccagtacttagctttaattctgacacttgcaggcaacattttatctagtaattttagagaaattggacatagatattaatacactttacagaagagaagtctgagaaacacttctgtcctgatgacttgctgatgttaggtttatagttaaccataagtgggtaaacggtttgctgatagtcatacagggagaaagtaccatggctccatgccttgagttccagggtgaggacagaggccaggacatcagttgtttatatcccttactatccttgtactaatgttcgtgccatagtgcaaagaggactcacaacgtgcaccatttttatgcctaaataatgcatagaaactctacttcttcttctcttgaggtattctctgcaactcttgcttatctgttttattgtctgtaacactgggattagtgagagcttttctttgggagaaaagtctctacattagatttgtattcagagatgaggcttgtttttgttttgtgtgttcatttgaggcatttatcttcctactgttccatgaactgggttggaggaaatggagagaaggttgttgtcagggcgtgcgacgtgagctggaattgctcacccactgcacagggtgtgccgaggcggctgctcccaggcatgcccacgcacccgtgttgcacactcgtttagtcagagatctcttatgctgtttcacattttgaacagatacaacagaggaagctgcatattggatgttggagctgacttagaaatgaaaccctcattttgttcacaagggaaggattgtttttagcctgggtcactgctgcagagagagatatttttccctctctctgtaatgtttgatacttgagggaaaacagctgggcctgagcatgctgactccctgcaaagtgcaatgggctgctggggaatatggactgtactgtatggctgaaaggtcagctttttcccttgtctctcttggaggaatgcagggtctgtcctcacattcgccttgtgagcccttagaaggagccgggagaggcggaagggctggctgcaatgtggcagacagtcttagccaatgggatggaagaggctgtttgcatctctttccctttcctgccctgctgtttttgattttcgggggagggctggaaaaagccaacagaattttggtttggagaagtagttgatgaccacgttaaacagcaagccctgatgggccagacagatgagagcctggcccaaaccacagcagtgaaactggaattacagggccagcatcggagggagagtcctgctggagtcctcctaagagaggacaaggaagtagttgagacagatgcccccacaggccacttgcccccacttgcccttgagggcaaggatgtgtgtttccgtgcctaggacctaattctacgccgatttagatcttaagatggtatgtggcactttgtaaacctcttgggcaaatttttgttggttcccaagttcagcaacagagctgccgaggttcagactggcagcaaggccggctacatccagccacacgggcaaagctcggagcaattacctgattaactttttcctttgtttctttgccagtcaagagaacaatcggatgatgagactgaggagtcggtgaagtttaagaggttacacaagctggtaaactccactcgcagagtcagaaagaaactaattagggtggaagaaatgaaaaaacccagcactgaaggtaaaaaaaaaaaaaaaaaaaaaaaaaaaaggcagactccaccctggttattccaaaagaaatcatttggggtcagtttctcagcagaaaagggatacgatttcaagtggaaaatgcattgagctctggctgaatctggcaggactatgcctgccagcagagtgatgctcagatgcgatgatgtgatggaatgaagggtcctggtgtcaggcgtttggggtgcttagtcatttcaatttaaaagatgggaaatggaaattttctcgaggtgtagtatagctttatgtatgagcttataccattttatataaactttctaactttttcacatgagcctccaatcccagaaaggactatggttcttgctcagtgaatttagttcaaatttcatgtacatacattttgaagaaatgcctaacaatcaaggcacctaatatccctttaaatttctcagggttgatttgttcttcctgtagagagtctcaagtctcaattcaaatgggggctttaaggacctaggattctaagagaatcttttaagagttgtattgctggggttagccaggtgaaacagtaatgtcaaaagacatcagcttggatttattgaaatggatagttagcctttgacatataattatgacagttcaaatctcaaccttattcatctctcttgttagtaatgtgcctctttgcagcatcttataaattctccccaaaaaggtaaaatgaaagaataagataagattttttctgtttgaaaaatgaaaataattgaattggataaaaatactggaaagactatgctttttaaaaaacaccttacttgttaaaatgtcatatctacattgtgaggaatttcaaaattttaacatgtaggttttaaaattatttttgtagaggcatttttgttatatagaaataaaatcaagccatgtaaagaaatgaatttccccttatttgcaaagataagggtttttcgtttttattgctgcttttaatttgtgtttggtattattcgtgggtttaaatcccttagaataataccgaagctaagtgggtaactgtgagagaatggggattcgaatggaaaacaaaaacatggggagagaaatcagctttgtggccaatttcttgggttgttttcagttccggggtttcattagggtatctttttgcgtggtaattctgtttacatttggatgcaatgctgattttacatttgggtgttttaatacctgcccgccagtcgtgaattccacagtattgaatgtaccctgtggcggcccttaccgaaatcacagacagggtcagttggtactgttgggggaaccatatggaattgccaacattcaactttaagggcacatttggtaacaaatctcatgaacactcggccaaaatcaagcctcagatataacaaatagatgggtggggttcatccataactgagataacatgggcaaagtatctagtcctgggcctgttccccagtgggcccttcacacatgatagtggtgtgttaaagcagcctttccactagaataacatgactaaaaatacagacattgtaatttgcacatttatttcagaataaatcaatccaactatctttgagaggcatcaatggaaaaggaaaaatatagcaaaagggataactctaacgtaaaaagtaataaccatatggaattctggctctgaactttaatttatctgggcacaaatcaggcttcacagatggaagatggatttagtgaactcaaatcctaaggtacactctggcatctgatgagtcagggtgctgagttgccgttggccaatctcacccatcttctcaggagaggccccaggtgtgtgtgtgtagctcaaggcgcctgctttgggctgccctccaattccctgctaaactggaacttcctccaacccctgcacaatagagaactctctgagggtcctcactggcagtggtacttgggagaggctatcttggcccctgtccatcttgcagagcaggaaggattcatacgccagtaggcgccccctcccccctcccccctcccccgcccttggacttacaaagggttgatcctttgacttcctgcgtgcctgtgctaataccaagttgtctgcatgataatcatcatgtattgagggcacaccgtgtgccaggcactttccttaacactttagattttatattctctttaatgtcatcctcagaatagctaccagaagtaagcacttacaccatcctcatttcgaaaatgaggaacctgagactcaaagaggctaaaagtaattgactcctggccactcagccagccagcagaaggcccagcacgatgtccaggcagcctgctccctgacagcagcctgttctcactccgctgccacctgtctcccccaccagctctggagtcctcggaaagccaggagagagatcagttcttcattcattctcacccttgcaccctgggtttcaagtccttatcctgtcagggacaaccctggccaatctttaacctaggctacattggtgccctttatctgcccatttctgtgtctttgccacagaatgcacacctttccttccctcattgctcccactcagttctctccagtaatgaatcgccagttttgtagaaagcctttcagttcatacagcactttcacgtaactcttttatgaggataatgtttactgttatcatcacaacagccttgccaggggtattatggaaagataggtaggcattattacagatgaggaaacagaggctcagagccaggaagtaattgcccaaggtcatggagctgtgagtggcagagccgggctggatgcagagcatacccctgagttcctggcattaagtcagcccacagcctacctctctcctcctgccaaaatcaccttgcctttggtaagccggtctcagctgaataagatagatgatggaggccttcacgtgaagcaaatcacagcaaatgtgatggagtgagctcatcttgatggtcactcttccagtaggggagttgtacgctcaagtcagagaaggatgggagaagcgatgctccaagttcaagccatccaggtcaaggttgggattccaagccactggtcaggctcagacggaaaagcccgcactacaggaggcctgccctcagcaccggcagatgcagcctcctgggaagcgtttgctacatttccctcacaaccccttaccagatgctgactttcctgaacccgagaatagagctacattcgtcatggacatgcgtgcaccagctggttccagactcagatgtgacaccaaagtattggaatctctgacaacaatcctaagcacagagcccagaaaatgtccaaagcaactgctgagtgacagatccttaggatacgcagggtggactcacctgacttccctgaaaccccttaggactgtgggtggagaagggcctttgtacatctgcgtggacacctgggcggatggtgaagccacaaccacgctcgacttctttaatagagaagtccatggttgggctgcccctgccacaggttgtgcctctagtcttagcccagtcgcttcttcttggaagtggagggtagactataactagaagaggttgccatttttatttccaacagcataagaacccttggtctccacaccttgtcagtcaggtgtcctgaggaaggagcgggaaacttccaggatattggtaccctgcatctgggctggtgaatttctgtgagaaccccgaatcctgcctttaaagtccccctgaaagatccctgaacaactcttcaggggactgtgggctaggcagagttttacatcttcttttccactttccagcttccccaccaccgtctgctgggcatgaatgtaaagttgaccttgggttgtatttaatagcagctgttcttttttgttgttgttgttagatttgtacctataaatcccatcaattgggaaagtaagccatttttagaattttaaaggatggctgccgttcttttcccctctgagttttgctctgaactgagcatagctcccctttttctctgacatttaaccacacactggcgccctcgtcccagctggtatatttagtgccatccttctgttccaaggaacttttccttttttcctcttcacaattcagcgggtggaaagctgcagagctcaaagtttccctataattaaagggacacagccagttgggatcgctacacccacagtttgacctacttcttttctcacatctgttcacataacacatgcggaaaagaacttggttttcctgccaagtccaaacctttccaccgggctctggagggcttggcttgccacctggctccagtgagggcttcaagagctggaatccctgagaccagtgggaccctggagctgcctgcgtgtcagggcccttaaacgccctggctgctcctagtgaggcctgagttgatgggagtatctggccgggatcactgagtttcctaactttttgcatttggcctgtcagctggagacgatgtgtcagtcacatttgcaagatacaacgctttatagtgtttctccccaccaaaacttccttggagatttagtcactcaaatggcatatgtaccaataaaacaatcactgtcagccacatgacatttatcacactccaactataaaaagcgaccagagccaacataaaggagtgcctttcagaagggggaaagatcctgattcctagtttcagagggttgcatttacaaactgcagagggcattatctcgaaatgctaaggcatattgtgattatggctagcttagattttgcaaacggcattttaaatacgcctgtgaaggtgttaggtctacaaagatatttaaagaagaagaaaacacatctgaatccttttaacattaagctcatgtgaaaccatgtatttgcacagtgtattttcatttttctgtacatatgtaagtgggagctgggtttataaagagggtcatgatacggagaaaggtggtgaatgtaaagaaagatgtatgcaagaatgcaaaggtgtgttcacaagagactctgttggtttccctccaggtggggaggagcacgtgtttgagaattcgccggtcctggatgaacggtccgccctctactctggcgtgcacaagaagccccttttctttgatggctctcctgagaaacctcccgaagatgactcagactctctcaccacgtctccatcctccagcagcctggacacctggggggctggccggaagttggtcaaaaccttcagcaaaggagagagccggggcctgattaagccccccaagaagatggggacattcttctcctacccagaagaagaaaaggcccagaaagtgtcccgctccctcaccgagggggagatgaagaagggtctcgggtccctaagccacggggtaagtacggatggtgtttgcttctatgacaaccaccgtcgcaggcaccaccttctggtgtccctggaggagtttcagagtgtccggaagcaaatccgcttgaagaaaacggatactaattattcctgttccagagcttttctctgccagcgtccctccagaaaaggcgtcaccagcaccacctgtgacctgcagctgctccggcagaaaggcaaagggggcgggagctgcggcttccccggcaggagggtgcgcgggcgcacctcggtcagcgagttcaatatcacctacgtggtggagcggagcctgtacagccacctgaacctgacccagctagtgcggcctgcctcagacaggaccctgagcaaggctgagagacaggacctgaggcggtgcctgctggaggaggatgaggaggcaaagaggaagtgggccgccacggtcgaccgctgtactaaaagggttctcttgagaatccaccagaagtctgtgagtcacaaagatggtcctgaggacggccttgtcatttctgtgatgtgcagtcaagcattatggcctttcttctgcggggaccggcttcctcccctctctcctgctcatgacgtcagggcacatcccaccatcaccttcaatttcaaatcctgctttcacttccaggcagctttcaccttctcttccatttctcctcttgtcagatgaagctgtttgagtgcccattaaaataagcattgaagctaatccagagaggggcttccagggtacaggggtggggtttggccgcctccaggagtggctgtcttgattctcggccattatgtcacttgacctcaaagaagctgattcaaaacagaagggcatttcacccttgaaagagatgcttgctcttggttttaaaattaaaacaataggagcaggctcatggaaaaactgccgtcatcacagtcaccaatttggtgatttgaaaacattttaaagcacatttattttattagtagaggcaagcagaaagttcgtaaatctaacaacaaaaatgggagcttttttgttttacttaagtctattccatgttcttatctttataaacaaatcaacatttggaaatgccttcccctagcctatagattcttctgtactcagcaaggaataaagtactcactttcaaagagtaggatgtttttcacttttaacgctggatgatcagagacctagtaagatttattttcaaggcatgacttactttgaacttcagaatatagatatttttccttctgaaattcccacctaacttttagtttgcacagtggcacatataaaatggtgcaaagtgaggaagtagatttcttggccctctgtcacctggcaccttgcttgatctgctcaggacagttggctgtgggcccttttaaagacctgaaagaatagagtgtccttcaatagtggttttcccagggggccttcccgttcatgaacaggatgttcttccccagacgatcagtgtaatttaaattcattcagtcgggttctgcttttgtgaaagtgaagacggattggtcaatgccattcttaaaacgaccttctctgttgtaaaagaatccttaggtccttcctagcccctgggttttccacatatttccacatgttgactttccttattttctgtcctttcatattcatgtaattcttgcagcacttttaatactactagtatgtagcaggaacttttcttctggctctttctgtatcatggcaacagtttttcaatggttgagtttttgttttaaaataacaattctctttctcactcattcagcctctggtttgctctgactcacagatattttgaaaaataaccagtcttagttttatgtatttattttttactttcagaagtgttctacccaattcatctgctcttgtatgttttgacatgaccttgatagaacagacgcacttcttctgttaattgatgactcacctctgtgagtttacatcatgtaatactgagaaatttcccaatctgagcaccttgaattgttgatgtgcctctcatgttatttactgtcagattaatactataactccatgagggccttgtctctagaagttatatttctgggatttgtgctagttagtgttgtaggccagtgattaattcttcattgacattgagtatggacatttgggcaagctcatctccaggcaccgcccccacctaacgtgctcctgtgtaatccctatcccaagtatcagtctgaggctgagtatttttaaaatactgtgagcttgagacactaatggacagtttgaacacttgcaaaaatatgtgttcagtaggaagttatatatttgcatattccttttcttgtagtacagttgtacaatcaaacaaatttaactttctaattatccagagaatgtaaataagtgttctatcatcttacaatagaaagaacttttttaaaaagggattaatcttatttctttgctagatttatttaaaaggttattttccattctccttgtcatatttctttcattttatctaaaagtttcctttattcttcaacctcaagctctttgtctttcgaaaatgccatatttgcttgatgaagcctcagggaaatgataatgctttgtatccactggaagtggtcacttgtctcgtattttatttggtcattcaatttttgtttgagagaacagacatgcatgacattttgcaattttgtccatttttgaattcaaccccaaaacatgtgtttccaactgcatggccattccattgactagccctcctcatcccaagcatctatctaaagtgtttttataattttcagtacaggaagtgtgtgaactaaaaaaacttcatttaggcttcatttatttaggtcatcaacgtcaagggctggttcatgtattgatttattttttatgagtctctttacagtccattttctcttttgaaggaatgctgtttaaagaactacttgatcttatagaaaaagttagaaattaattcaagcaatctttattgttatattctttgtcactcctccactgtaaaaaagaatcaattccagatatcttagcctatcactgaaagaggttttagttggtagttaagaaaactggtccattctttcagtttttcattttagaaataaatgcatacaataggcatgtgaaaacttaaatgagattctaatttattgcagtcataatttccacataaattctttgtcacttatttcatatgtatcagaaataacttgggctccaacattgcagtagatgctgtggtttaaagcagggacgtgcaaaagccatacaatgatgaggcatctgggtgccataccatgtctgtgaagccctgagtcacgggaaaggaactagaataaaatcactgcttttgcaagaaggaggaaatgtacatggcattataagctggaaagagaaggttaatgttaaaaattagccttgagaggtggtcataacattgcttacccagttaggtgatttggtgaatatatttgtgtagaaaggtttttctctttctatagaatagatataggtccagttaagctgacgataagagaaatcagattgcccattgatatttaatacagaattaggataatgtctattagaaaacaagtcggtagtagcagcagcagcagcagcatcggtgaataagaacagctctgagacctcctgatgtcagttgtcacgaaatgctttccttatctcctggccctctccagaccccaatggccgtctctcactttgtggcccattcctggtatgctctgattttatagttgaactcccagattagattgtaaggcccagaacaaagctccagccctgtatttgcatatttgtaatgttaactaagcctcaacttcagtataacagctgtcaggatgactaccacattctcagtacagccttaatgaaaagtagtggaagaaaccagcattcatagagtgtctgccttgtgccaggcagtgcgctagaaggcttcaaatatgatataagtattattttaataatgaagaatctaaagctcagagagtgtaagtactttacctgagatcacacagcaagtaagtggcagaaccaggatttgcatctagatttctgtgatttcaaaaatgtaggcattttccttctaggatgtttctactttatcaattcagttaattatatatatatatatatatatatattttttttaatgaataagcaatgcttatagtatattaggttggtgcaaaagtaatcgcagtttttaccattgaaaataatggcaaaactgcgattacttttgcaccaacctaatacattgtacttttctgttcatttcttccatttaatagctgttcattagacttctctgagaagctggtaatacaaaatattgaagcccgaatctacaattaaacttttattactgatttttaaaaaagataattagctgtaacattaatgtgtgttgtggggcacagggcggtcactcagtggcttttactagaaaaacaacagtgaatttgaatcaagttctgcaaatacagaaatcactaagatataagcagttccgtgaagtttgcaaccacctaaaaggataataaagttttcattctttataacatcagcattgttcctactgaaattaaaaagtgtggtcaaacacagtcactgaatcaaccgttttctttctgggcaaatgtggcatcttcattcactgagagaaaagggtcaccatgaattaacttgggcagttcgatgggaaagttaccagcgtttttggctaggatggggaagcggtgagtgagtaattctcttggcctgattggacaactgtaaacataaccttctccccccctcttctcagcgatttaaagctaaacaaaatgaaagtctgtttgaaaagcttgctgttggtgtcagagccgtgggatttcaaacctgggttttcaggatgcctgagtacatggatcctctaacacatatcccttcattatctctactgaatgtagctgatgttaggggaagttctgtgctggagacagggaatctcacagcactggactcatggagggtttttcttttgttttttaggctttttaaaaaaaatggttggtttttgcatgttaaggggattctagacctctggggtaggcagagttccagtggcctgtgaaagggaaaaatgagtgaagtttccttacgacatgactcatgtgtttttttctcatcatttctcgttttctactttcatcctgtccacgtatttgtgattcagagatgtcctgcaaacggggactgctgggttggtgcactgccggctggcttaagcataactgaagtttttctgccctaccctcttttccacagagaacctgcagttttggaggatttgacttgacgaatcgctctctgcacgttggcagtaataattctgacccaatggtgagtaacatcagaggaaagcaaaaaatatggattcaggcgatgaggttgacaatagttcaccattgagtatctttgagaattgatactgggtaccgttttccttggtaatcctgagtcacgtttggaaaaaagctctatttcacttgccttacagactccactgttccacgtggaatgaatgatgaccactctcactgccatctccttccttgagtagcacagttcctttaatgcctttgcttccagttttcttcaagtaacaaatccagataagtctggcctctgtggtctgagtcattttgcacacggccttttcttcttgctagttgcaagcatgtaactactacacacacatagtgccatgaagtggagccctgtgatttggtccccaagagtatgtgctggcattttggaacaccagtcttattatgggcccagtacctggccccacatggcctatactaagcctaggattttgtggtctggggtgtcctggaatgaacccagtctctgtgggaccaaagcagaccagatccctcaggggtctggtgtcaggcccaggtgtctgccctctcagacctgctttggggtcatagtctagggacaggccaccacagtggcacacaagttttgtttcctgaaatttgctttctcagaccccaagggtgaaggtgagtcttttttttttttttttttttttttttttttaagatggagtctcgctctgtagcccagactggagtgtagtggcacaatcttgcctcactgcaacttctgcctcccagatcccagttaagcaattctcctgcctcagcctcccgactggctaggattacaggtgcacgccaccatgcccagagaatttgtgtatttttagtagagatggggtttctccatgttggccaggctggtcttgaactcctgaccttgtgatccgcccatcttggcctcccagagtgctgggattacaggtgtgagccacgcgcccggcctttggtgagtcttacatgtagtttagcttgtcctttgcattgtgtcataaaactgtaaaatgaagatttcatgtttcatatttgttatgatcatgggtcagctaaaatacccacctgggatatatatgaaatgttttgaaaatttcctggaagagaattaaactattttatttggctatcgaattatattgattcttaagccaatagttttctgctgtcaatcttttttagaaatgagagaaaatatgatttttttctttctcagggagaagtttgttttttaaaaaaatgcagactagaatgagagatgaccacaatctagctctttaagagagagaaatttacacactgagtgctatggtgatggaaatccaatcagatgttgctcttctaacgactgagctttcaccatttgttctaatctctttctccaggcaattcggtagtattatccctctattctcccccattgctgggattacatgaacattggttcatgtaaatcactttttttttttttttttccctctgagagggagtctcactctgtcgcccaggctggagtgcagtgacgcgatctcagctcactgcaagctccacctcccggattcacaccattctcctgcctcagcttcctgagtagctgggactacagacgcccaccaccacgcccagctaattttttgtatttttagtagagacggggtttcaccgtgttagtcaggatggtctcgatctcctgacctcgtgatccacctgcctcagcctcccaaaggtaaatcactctttactgatgaaatgcagcccccttggatgttaaaaatagtggaaaaaatgtaacctgataagaatgtactaaaagtaagtaaaataaaaagtgactcacatcccactttaagcaaacaaaaatagtcaataagctttaatttttaatcaaagagataaataatagcactgagttaacacaagaaaaacgtcaagatccatgaggaatgtcaatatttctgagagctaggatgttaatggtttaaataataaaacctgttcttcattttctgcgaccaacaatacttgcaacattttgttttacagggtaaagaaggagactttgtgtacaaagaagtcatcaaatcacctactgcctctcgcatctctcttgggaaaaaggtgaaatcagtgaaagagacgatgagaaagagaatgtctaaaaaatacagcagctctgtctctgagcaggtatgcagctacctggtagaatgttcccttggttcttcctgacaagaaaagctgagaatggcccttctgagattttaaatggtgctaaatacacatactccttggcattaacctgctccaagtccgtgctttatttacgtagagaaacactgaattcaacacacgtttattaagcactttgggctgctcagcaccgtgcttggtgctgggaatacaaaatacagaacttgccttctgtgtacagacaagagagacagacatgtaaagaaatggttattcttcagtgcactaagcgttgtaaatttgaatacaaaggaaggattttattttctaaactatgccttgctacaaaatggatgttacctgaatcaaacctaaagctttttttttttgggggggggggtggcagtagacttgtcgatcatagcataagttgttctagaagcacatagccagtctaagaaataaactcaaagttcttcctgggtaccaggctttggtaataatgtttcagagaggggtgttttccctcatttgccttatctgtagccatgaaggaaggtatcatagaattgatttttcccccctggatctataatttcattgctagagaaatgactgtttctgtctaaattgcatgggtggagggagtaaagatagttggagagctgggcctcaaggtaattatgaccattcaattttcaagacactctcctccagcacctgtatagcactcattttgtagcctgttgaagttcctgtgtatgagctggttgtctgcttgaaatatgtaggtaatgcactttatctaccaaataaaaacagcaggaaaagcagacatttttgctcagctgctgctctctggtgggcacagtgagctaaaaccaagcatcgcccctatgcgaatgaccgaacgtcaccagcctgccacccacctcacttgattcaaacaaagcctgcacagcagcttcagttgattacagtggttctcacggggaaggggtgagaggctatcattttgctcccccatggactccagggcaatgtctttcaatggtcagactgggttgaggtgaagtggagtggatattgctggcatctagggcagcagtgcccaatctttttgcaccagggactggtttcgtggaaggcaatttttccacggagctggtgtaggtggtggtttcaggatgattcacatgcattacatttattgttcacttcatttctattgttattacattgtaatatataatgaaataattatacaactcaccataatgtagaatcagtgggagccctgagcttgttttcctgcaactagatgatcccatctggggatgatgggagacagtgacagatcatcaggcattagattctcataaacagcgtgcaacctagatgcctcgtgtgcacaattcacaataggattcgtgctcctacgagaatctaataccgccgctgatctgacaggaggtggagctcagacagtaatgcgggtaatggagagtggctgtgaaaacagatgaagcttggcctgctcacccgccactcacctcctgctgtacggcccacttcttaacaggccacagacgggttctggtccgtggcccgggagttggagaatgctgatctagaggatagaggccagggacgctgccaaacatcttagcatgcacaggacggtctgcacagcaaagagctgtccatcaaaatgatcagtgctcaggctgagaaaccgtggcttgttagacctgcaggagatagatgtctggactgccttcagcatgtcttatccatgattttttttctttattcttttcattctcttgtccttgtgggtgacggagtgatagtgattctatatttcttcccagcaatgaagcagtcagcatgctagtgagagcatgctactaattgaaagcattttattaagtttgcttttccccaagatagattgaaacagccactaaaactcttaagctttacgttcacagaggttttctgctttatgaatcagaagcatagaattttaatgtcattttggcatttttcaataattttactaccatatagcaatcttatgtgcttagttctgtttttttaaagcagccatttcacataagttaaggaataaaagaaacaactgatcattataaattttctgtaaagcaaaaataatggaaggttttatgtggttgttttttttttgtttttgtttttgttttgagacggagtgtcactctgtcacccaggctggagtgcaatggtgtggcctcggcttactgcaacctctgcctcctgggttcaagcgattctcccacctcagcctcttgagtagctgggactacaggcacgtgccaccatacccggctaattattgtatttttagtagagatggggtttcactacgttggccaggctggtctcgaactcctgacctcgtgagccacccacctcagcctcccagagtgctgggattacaggcatgagccactgcgcccaccttgtgtgtttttttaaaaaaactttttagtaaatataccaaccattatggtagggatatttgttttctccgttgctgctatatgcccaatacctggattagtgcctgttattgtaggtaattcataaacatgtgatgaataaattaataattttttaaagcatttgaaaatatatcagagacccacatttactattgctgtttttcaaactgcgtgcttttttcagaagcattacagaagattttaatgggaaaaaagttacttattttatgacgcagaaaggaggaatgaattttttttttttaaggaattcatactttggagcttcagtaacttcctaataatgtcagctctagttttctttgttgtttttgaggtcgcttgctcactttcctcacattgaaagcactaatgtgtgttggatcagaagctgctgttgctgatgtcctcagatgtttgcaggacctgcggagctgtgttaaggcccttctgatgactcggcagcatgcaaatagcaggtttcattttagctggttttgagcccgtgtggctgcggccatatgtaatatgccagagacttttctattttggcaagtaaacaattctcactgcaaactttctgaagtgtgatatcgtctattgatgtagcaccacgaatcaaataagcatgctatactcaaatgtgcaaatgaggagccgctgagaggataatacttagctactcaaaatgcaggaagtactgctgagtcactcccatcaggattctggtgtgaaagagatttcccagctttttactgacaacactttagaaaagtgaaagaagctaaaactttagagtaacatatggaaattttatggtagactggaaaatagtatgtttgctgtatatgtgggttttaaattcatgtttccttatccaatgccaataatttgtacaaatagaaatataagaatctagccaattttttttttccaggaatacacttttttaaaagtgcatgtttcctatccaagtagattaaatatcctctgactacacttccaggtattctagtaatcatggattgtacttgatctacatttgaagtccagccttgctactgggcttttgcgtatgctgagtctctaaacctttaagtattttgtctgtgtggtagacagattttttttttcttggagattccaagaatatctattcgagaatgagaaatagtatttgagtgcttaataaatagtgacattggccacgactttaaaagtaagcgaggatgtaagtttaagaggaggagaatattggttatagaatcaaatataggtatagattgatttgattgatttcgttgaaggccaagtcgctgagaattacaaaacaacacctgtccactctgatgaacttcttcattttgttgaaacccatggcaggactcgggccttgatggaatgcctggctcccctccgccttcacagcccgaccccgaacacttggacaagcccaagctcaaggccgggggttctgtagaaagtcttcgcagttctctcagtgggcagagctccatgagtaagtcgagtttgtcattgtagattattttctttggagttaatatctgacatatactgagcactaggttcaggcaatttcaaggtgaataagaccaagtcctgcccttcaggtgctattagagaatcagaccaataaactctctggactcagagtcgtgtttgtttattagtagacatgcagcagcagcagcccaaaacaggaggtgatgaattttgatcggagacaatagggaaagcatctcagaggaaggatctagagagcagggggaataagccagggagacaagcacatgaagatgaccagcaaaataaagggagtggggaagggaggggaattttatatgtgactgataaattcgggccaatggtagttggagttggctgaatggtatgaaggaaaagatcaactttattttatttttatttttatttttgagatggagtctcactgtctcccaggctggagtgcagtgttgtgatctcagctcactgcaaccttcacctccctggctcaagggatcctcctgcctcagccttccgcatagctgtactacagggtcatgccaccacacccggctaattttgttgtagagacggggttttgccatgtagcccaggctggtggaactcctggactcaagcgatctgcccacctcggcctcctaaagtgctgggattataggcgtgagccaccgtgccccgagatcaagtttaaacctaccactttaagctctttcttacccttttgggcaaatgacatgactgctctgaatttgtttcctcatctgtaaaatggttagagagagtgtgcattaccactgagaggtcacgaatgttaagagcagagtctggtgcctggccctgcagtgtcctccacgcgggatcctccgtgccacatggattcccaggtcatgagggtaacttgctgtgagtcccctgtccactgaggagctgagggatagcactcggagaattcataactgggccctgccctggtcctgacagagggttgtggctcaaggcttcctttctctgggccttcatttcctaatctgccataccttcaatacctttctgctttgctgggtgggaaatctggatctacccgtgttcttcctatgtttcctgtacaggcggtcaaacagtgagcaccactgattcctcaaccagcaaccgggaaagcgtcaagtcggaagatggggatgacgaagagccgccttaccgaggcccgttctgcgggcgtgccagggtgcacaccgacttcacccccagtccctatgacacagactcactcaagctcaaggtatctctctccctggcctcagagcagctaactgggctcttccatttctctaggaggctttctttcctcctcactgttgaatgctgggctactatggtacagactggacagtatcttggctacctcgatcactggtctcctctgtagtgaaaaacagaacaagaaccagccagccctcgaggcagagggagggtctcgtgttaatccctgggttagcatcacttcacccctctgacctcagcttccctctagaattcctgttgcacaccctccctctccccacctggctcctgctccacacacctggtttctgtgttttctccatctgaagaaagatttctgccttctgtgtgctcagaggtacctttatgggacagatggggttccacaaagtgtgtgcagccatgacagggccgggattgccactggttaggacaggtgggaagtgcctcctctaagaagtgggagccctctgaggagggaaggcgttcagagtgccgggcgggcagcctggctgagagcaccaggggtaccccaggcacccctggttctgcagggcaggagggtggaggggctgtgaccgggggcctgcgtggaattccgtacagtcagagacacctgtctggcctctgcggagctcacagtcacatcctatgcaggtcactcagaggggtgacttgtgggaccccgattctggcctttgtggcatcttcacttctgcatgacctgtgtatctgacagattcttgatttgtacgttcatggaatgtacctaatggaaagatctttgctccctgggccacagaaaggagatatcatcgatataatcagcaagccacccatggggacctggatgggcctgctgaacaacaaagtcggcacgttcaagttcatctacgtggacgtgctcagtgaagacgaggagaaacccaaacgccccaccaggaggcgtcggaaaggacgaccaccccagcccaagtctgtggaggatctcctggatcggattaacctaaaagtcagtcgcttctgattcttgtcacacgctactacctcactgcctttttctctcctacactaagcaagtgagggcatttttagggtagggttggggctgatctgtgtggtccaataagggcagctcgttactatgatgagcattcattattctacagaaagagttagttagttaccagttttccaacactgcccttgacctcagctgtgggtgatagcgtaagccccgggtcaaaccttgctgctggaagagctgtaggcagaaactcctggcaccttgatcgcagctagctccacaggggccacaaggaaactctgcgcccacctctctcccaccatcactccaggcatctactagcatgagtctgcaatgagagattatgtttcctctttgcaaaactcttgatcctgaggacttaaaagctggattttaatagctctgtaagtggaggaggagtctcctctgttgtgggctctgtggaggtaaaggaattagctcttatcaagagtacaattatagtgcaagccagcagaatccatcacagcctgcaatgtacatcttcctaacccatgattaataaaacaccctgcttgcctactaagccagagggctgggatgtacaggatccattgcaaatgatacttactaatcttttgattagcctgaaggtgactatgggaacagtgtgtgggttgcaggctagttgttggcggtgttatcatgtgtctgggctggctgacacccttctgtcttccttctccctctcacaggagcacatgcccactttcctgttcaatggatatgaagatttggacacctttaagctgctggaggaggaagacttggatgagttaaatatcagggacccggaacacagagctgttctcttgacagcagtggagctgttacaagagtatgacagtaagtccctgtatgcacagaggtgttccctgtgaggtctgccacagcaggccccacgtatgctgccagtatgtgcttaggtccctggagtcacttattctgtcctgttctttctgttacaagagtatgacagtaagtccctgtacgcacagaggtgttccctgtgaggtctgccacagcaggccccacctacgctgccagtatgtgcttaggtccctggagtcacttattctgtcctgttctttcccatgccaaggtcaaacagcacaaaatcataaattcccagtgcagacatgggaacaaaagaaaacctcctgtgccgccgccacctttccgggcatgtttctaggtgatagttgaagaggattctgcaccaagtgtctgcaagaatggaattacagttttcccaaaaaaatgggtagactccactttcagtacttttgagaggtgcagcctccagcaggccattgggacagctgagcacaaaagtgactgaccagctgggaggttttcgctcagccaaagcttgattacttctcagagcacacgaggagttgtgttcttattgaatagactggttagtgaataaatgaaattcatcagctttcgttaaaggaggagacgtctctccgcagtgaatatgtagagcagagaattccgtatcgattggcttgcaaattcccaacctaaatgacagcttatttttacagcctgtgagcagaatcatcactgagctcacagcttttatgaagtctgtctatttgaatacaccataccctttgctccattaactcagtcttatcttgctctgtattattcaatctgccatcagaaatattcctgaaatcattcatcttaaaggagtatcctttccagttactgaattcaaacacgttttccttcaaggactctgcttcagggatatcagtagctaatagcatttctgttgctaaaagacacaccaaaaccatggttaatggtggaaaaaagaattatacattactgaaatgtatcaggcctgagaaacgtggaagcaagtgtcattaggtgaaattcccttctgctaaataggcagtccctctaaatgaactggtaagctagagaaacacacaccatcagatagatgtctgagcctaagataaacaggctgcctttagggatagatttgggatagatttggaggcaattgtgattcatagttaatatcactttataacaaggtcttttaagtaagtatttgattgcccaagagacactttggggtctgtggccaggttgcgtgtaaagagcctgcacggtaactggtgtagcctaccagctcaattagtatgaatcagtattaaagcatctattgtcccgaaccacatctgcccagaaacagctcacttgctcttcctcagtcaccaagaacagctggggtttttgttttgttttgttttattttgttttgtttttgagacagaatttcactctcgttgcccaagctggagtgcagtggtgcgatcttggttcaccgcaacctccgcctcccgggttcaagcaattctcctgcctcagcctcccgagtagctgggattacaggcatgcaccactacgcatggctaatttgtgtatttttagtagagacggggtttcaccatgatggccaagctggcctcaaactcctgacctcaggtgatccgcccacctcggcctcccaaagtgctgggattacaggtgtgagccactgcatccaaccaacagctggtttatatatactctccatgacatttcctttatcatccacagctttggaggagaaaagctaactcctgagtgtaaggcaggaatctgtgcttagactgctccatgccactttggctgagacccatcattcctcctgggatcacatcctgagatttttgtaccaaggagcattttgtaggagggtatcgctatccatcaggttgctaacctggaaggtgaagaagacctctttgcctcttcagacattccattgtggatctattctgctctggtgtttagaacgtccctgatagataaagttgtacttccttttattggttctaaaacaaaggcttcaaggttccagagtacccattagtgccaagagtcagggtccagacttttcctagcattataggatttttacatccaatacagttaaagtcatcgtggctaagaagtagtgcctctaactgataacatgataggtttctgtcaaacaagatttccatacactagggagatgcagaggtctattgagatctttgaagatatgtagggatcttgaaaggtttctagcttagccataactgagagcaaaaagtacatttccagcactacttggaagtcagacccgtccagcctccctcgaagcgtgggaaaatgccagccatcatatagggttccattgggaaaagactctaattgtcagatggctattccttacgccaagcccagacccactatcttaggtctggcaaatgaaagcctcttacaaattgctaaaagaatttttacttgtggtaaaatacagataatctaaagtttactgtcttagccatttctaagtataaacaataacttgtataagaattctaattaggaattatttcaaacatgcagaaaagtacagaggaaaagaaaacaaacaaacatatgcatgcacatgctgaagttaatgttttgccatattttcttatttcttttacattttaagaaatatggtgtaagcccacagaaagtcctgctttcaaagaatcccattcccttctcttctttcccaaggtaactgctccccaggcaatgctatgtgcctttgggtaccactaccttttgatgttggaatattcataggtgtcttagcatattctgtgtgtgtgtgtgtgtgtgtgtgtgtgtgtgtgtgtgtgtgtgtgtgtgtgtgtggttggtgaggctggaggcagagagagcttagcccaagcagagtcccttcaggtcaaagttcaggtcatgctcaaatggggttacagcctcacaacctagcactttgctgtgatttgactgtgagaattttcagcgttctagcttatcttccttcttaccttttgtaccttggcacccacgctgacaagtgtgggaaaaggtcatggtcttgattctgcactacagaggagaggcacctcacctctttttctcttctccctaatgaagacagcgattctagcccccttccttacgccaactgtggttttcaggtgacacaatggatcccctccttctccaaaataatttcaggtattctgctgtgtctgctgaggctggggtccccaaagatgcaggcacagcacatacttccatgctgcagtaggagcaggtcttctgtgttactcccacccagcactctggagtctgttttggccactgtggtgcactgaaccatgtcaccagggacagagtacaccgactcctctccctgggttgtaatggatagcacaaagccctcattttataagtatcatttttctaaataacatgctaggccagaacaaaggccactgcaaagccacaggctcttccacacagtgaggacaccgctctagaatgttccacttttaggtggtcagggggacagtatttgctcttgtgcttccaattagttaatttttcattagtcactttaaaagtagcactcttaatttgggattctaattgagggacttacgctgccacgatctctgctgtagttggggctgtaaaatgctttccccgtgagaaatgcaagcaggaagtggtggacagccggagagctgccagagccttctgcctccccgcatttttattttgatgacctgagaaaaggcatcacatttctggcttattgatttctttttttctttgtgtatgtggttggagtggggaagttggtgggggatgaaaagaaaggaaaataaagccattcatcattgcaactagctattttgtgtagaaaatgttttcttggtttctgttttatgtgaccaagcacttacttactctgcataataatgcaaagatgttctgcgtgtaacctcagtgtcccatgtaaggctccatgtgccctttctacaacatgccgggtgatgctgctagggtgttgaaggccctcgtggctttccacgtgatttacttggggcagattcactcaacagaagcgtccgatgctgcttttttttttttttcccctccagctttgttgaggcacagttgacaaataatgatgcttctctttaaaagccttcctcagaatgaggtcttcctttttttttctttattttattttttatttatttcagtagctttgggggtataagtggttttgggttacatggatgaattatatagtggtgaattctgagattttagtgcacccatcatctgagtagtatacattgtacctaatgtgtagtttttttatccctagactccccccacccttcctcttctgactctctgaagtccattatatcactttgtatgcctttatgtgcttatagcttagctcctacttacaagtgagaccgtgtggattttggttttctactcctgtgttacttcacttagaataatggcctccaggtccatccaaattgctgcaaagacattatttctttccttttcatggccaagtagtactccatggtgtataggtactgcattttctttatccactcagaatgaggacattcagttttcagtcatccatttatctataccagcaagcatgtatctgttactcagcttccaagttcgagggtttcctaagctttccccagcttttacttatatgcaggagacaaaaatgtgctggcacaagacaaaaggagaagcagaaaagaaaaaacaacctctaactcatcccaaacaacaaaaacaaaagaagatttgccactggcctgtcctgagttttggggtttgtgcctcgtcttgccagccttactcttgctgagctaatacaagagccctcagcacgtgttgctgagggctaagaatgctcctaaatgctaataaaatttatttcatttgacactttaatattagctcccaaatttggaaagttggcaacataactgtcttcaagcacaagtcttacagatctccgaaaaacatatgacctaatctcaccttgtgaatggggcgtttattctttctttgcttctccttgatggtgccatcactcagaagggtctgggagccccactgccaaaacaacactctacctttctcctttcctcatagccccaaggccagagtcagcttctgttcgcataactaacttaaaaggtgtcaacatattccaactgtgtgctctctccaaacttatcttcgtgcgatgaataccttattggaagaaaagttgtgatcacactagttcattttgatctcatctattttaagataaattgttctcttccaaaagctcagggcagtaactgaggataaagtcgagatctgttgactctgaaacctctgcttttcactcaccttgttgatttcatgccgtgttctctcctctaggtaacagcgaccagtcaggatcccaggagaagctgctcgttgacagccagggcctgagtggatgctcaccccgagactcaggatgctacgaaagcagtgagaacctggaaaacggtaatgtcagcatgagtcgctgggaacctgctttgacaagtactgatttcaaagcacagttttctgcaaaaggacgattctattcctgtcatgaactcagcaatcatcgtttcctttctcacctctacaccattctagtccaagttagcctccctatctattctcctggctgctgggtgaggttaataaattctgtgtcaaatacctgcagctgtaaaacctaaattgtgtgtctcctatgcccttttctgtatgcaataaaaaccaacattggagtgttgggagctattaggtccataaggaaaacagtttaccaggtagaccatccatcagggtcataccagcagcagtgtcttaaatgcctcggctgcatggcctgaatgtcgaggcagttactgcaggagagaaggattggatggccacatgtcttgtttgtggcctctctgtacagccagtcaggaagtgtaatcagtatgaaatttcagaaaaggtacttgtctcaaacagaagaggagtcttaagtggtatggggtcaggtgggctaaacgttaccatggatggctttgtggtttcctgttgtgaccccagaattcccattgtagcaagatgagaaacagtggtaagaggcttacgctgccacagtgacctaaatctctgtcaaactcttgaaggccgtcataaaaaatgcccaggtttgatagcttttagcagccattggaatcctatctagtagcccatgtgttaagatatttactgagcacctactaaagcaaacttttttaaaacttaatgcaggttgtactttattagtaggtcatgaaagcagtttagtgggtcatggacagcagttttgtaagacaaaatagaatacaaaatatcagagagcatcccctaagataaaggttagtattgttagcactgtcacttgtaatccttgtttcagttatgtctgtgtgtgtgtttgtgcttgtgtacatgcatgtgtgtctctgtgtactacatgttgaatgtaaaatgtatttcttactgggaatcatgggaaaaaatagtttgagagccattgtgggtaccaaaactagggctaaggacaggaaagtgggtgtccaggatgcaaaccctaagcaagtgctcactctcgggtaccagccctgcactcacatgactctgggcattcacctccttagagtttgtcctctgggcaccttgtttgcctcactctaattccaattctaagaagcatcttggggacctcagaatttgagccatgatgccctgctattcaaggttttctatcaacttgggaagatagtagttctccccaaactatatataatattcagatagcctcggtcaagacaggatgcaaaactcacctagtatcccagtacatcctcagtttcagtaaacatcagaatccttatgtagctcatgtaggttctgaagaatttttttttctcttaataaccttttcatatccaaaacttttcaggaaattaattcccccaactgttggtgattggtaaggatctcacagatatcactggcagaatttttcatgcccaaatgaattcaggtgtacctgctgaagaactagattgctagcgaaccatactttgaactcaaagtaagttcagggatctttctaatgtaatgcagaatgcaaaaatggaacttatatatatagttttatattgggagttaagggaaaagaaagtcatatttctaaatttatgctaaagaggttctaataattttctatttcaacccacttttaaaatctgatgcaattttttttttctgaagaggtatttcttcatttatctgtgatgatttttcttttctttttatgaggcggagtctcgctctgtcgcccaggctggagtgcagtggcgcgatcttggctcactgcaaggtccacctcccgggttcatgccattctcccgcctcagcctcccgagtagctgggactacaggcgcctgccaccatgcccggctaattttttatattttttatgagagacggggtttcaccgtgttagccaggatggtctcgatctcctgacctcgtgatccacctgccttggcctccttaagttgtgatgatttttctaataatgaaaagtaggaccatggtcaatatcttcagtagtagcactaggctgatgatctttatgtaacaacaataatatcctacaaatgcatagcatgttggtgtttatcagtgtggaacatacaggtggacagggtcaaagcacacaacaaacatgttatcaaccaaaaatgtaacaagggacagtgtgtgtgtgtgtgtgtgtgtgtgtgtgcgcgcgcacatgtaagtactgatgagaacaaagcattcagcacattgtctggcccatgaattgtaagttcttggcaaagcttatccaacagcagcagtttagtatcaactaccagtcgtcagataagtagattatgtctggttgatagttcagttatcagtctggcagttgtaactaggactgttgctttgctgggacctaaaactttatcagtattttgtagattttctttggcaaagtactcacaaaagtttacctgtctgtgtccaggttggttgattgcttctaggataaacttactagaaggaggggcttcagggaaggtgggatttgagtattcacagatcactctgtaggggataccatttatagaacctgttgtgaaattcagtccagctctccttttccatcatgaccttgagaaattgtactcacccaacaaatctcatcaatatgcggtatgatgatcagcctctttccacgtcgattgcagtggggcacagacttaagccaagatttattttactgcttgacacagcgtatttctttcccatgtaacccaattaatttcagtcttcatgattcctttaataagactaagaattctttctaaaaataaaaatggaaccataataaccctctatcacccgatgtcataaatggtgattttatgtttttagtgtaattgaacaataggatgtgggtgttggagatttcaattatgttagcacaactttatgcatccgtttgattgatttgcttttaaaatgtgattgtaaaatattcccttgtctcacaggcaagactcggaaagctagcctcctatctgccaagtcatccaccgagcccagcttgaagtcttttagcagaaaccagttgggcaattacccaacattgcctttaatgaaatcaggggatgcactgaagcagggacaggaggagggcaggctgggtggtggccttgccccagacacgtccaagagctgtgacccacctggtgtgactggtttgaataaaaaccgaagaagcctcccagtttccatctgccggagctgtgagaccctggagggcccccagactgtggacacttggccccgatcccattccctggatgaccttcaagtggagcctggtgctgagcaagacgtgcctaccgaggtgacagaaccgccccctcagattgtacctgaagtgccacagaagacgaccgcctcttccacgaaggcccagcccctggagcaagactctgctgtcgacaatgcattgctactgacccaaagcaagagattttctgaacctcagaaattgacaactaagaaactggagggctcaatcgcagcctctggtcgcggcctgtcaccccctcagtgtttgcccagaaactatgatgctcagcctcctggagctaaacacggtttagcaaggacgcctctggagggccacagaaaaggacacgagtttgaaggaacacaccatcccctgggcaccaaagaaggggtagatgctgagcagagaatgcagcccaaaattccatcacagcctccacctgttcctgccaaaaagagcagagaacgccttgctaacggactccaccctgttcccatgggccccagtggggccctccccagtcccgatgcgccatgcctgccagtgaaaaggggcagccccgccagccccaccagccctagcgactgtcccccagcactggctcccaggcctctctcagggcaggcgcctggcagcccaccaagcacaaggccgcccccctggctctcagagctccccgagaacacaagcctccaggagcacggtgtgaagctgggcccggctttgaccaggaaggtctcctgtgcccggggagtggatctagaaacgctcactgaaaacaagctgcacgctgaaggcatcgatctcacggaggagccgtattctgataaggtatcaaaggtcctgggcccaccacgttcacaggcctttgtttgtagaagtcaggcagccaggtgagatgaacccacatctgaagccagcccggtagcccgcccagtggacaggagacacctgaatccacgtgtccacaccttacttgacatgcatgtgttcagatattgacaccaccccatttcatctctccgtaggtaaaccgaggttaaaaataacctgcatgaagacctcttagagggattactaggagcaaataaaataaatgtggacaaaagaaccctattcagatgtgataattgtattatacagttatctgtatgggtaatgggaaaaagataatataaaatcccccattgtaccaaaaacatttagctgtataatgaaaaattatttctcattcaaaaaaaatgagatctaccaataccaagtgactccaaagacaaagcaatgctaacagatacagcagtactttactcctggaaatacaggtcctattaggatgcattcctgagagtcctttattataaaattctcatgacaatgaatgccttagaatcagatcctcctccacctctctgaccctccttgatatttcctgagtgaatgtctttaaatgaaaggtagtgagaaagaccatacagtaaatgctggcctagtgagctggtggtatcacttgtagcagataaagtgcaaacagttgaatatctgtaaagcagaagttagcccttctctcctgcagtttagaagactctcttcagtaacattagaggagttgtattttgcaaaatgatctgattgaggcgaaggcattgtcctgaaaaatgtggaataattgtgttctgccttaactatgcttcagaacattttcctagagctcatcagtactttaagataaagatgtaaaagtattccctctaaagcattcatcctgaccaataaagaaaatatattcatttcaaattcaaacttttgggttgggtgtggtggcttacgcctggaatcccaacactttgggaggccaaggcgagaagatcgcttgagcccaggagtttgaggctgcagtgagccatgatcacaccactgcactccagtctaagtgacagtgagaccctacgttatatgtggtgtatcttagggaaagaaaaacaaaatccttatgactcttgatgtcatattcctgttctccctggcagcatggccgctgtgggattcctgaagccctggtgcagagatacgcagaggacttggatcagcccgagcgggacgtcgccgccaacatggaccagatccgggtgaagcagcttcggaagcagcaccgcatggcggtgagcagcccacagttctccagcttcctgaggcacatttagtgatcacgcttagtgatgaccatactaacaactgccaagtaggcaagggcttgcgtagctatggaaaggagacagctggggagaaagtaatatgtggtcagcctagaaatgtttaaaaatacactttcagaaagaaaaaaaaaatgaaaattatccgtaatcccaacactgtgaaaaactttttaaagatccgtctagtgctgggcgtgatagtgcacacctgtaatcctagttacttgggaggcagaagcaggaggattgcttgagcccagaattttgatgccggcctgggcaacatagtgagaccccatctcttaagaaataaaataaaatccgtctgaatgacacagtttcagttagaagcataacttccaaagatctattgttcaacatggtgactacagttaataacaatgtatacttgaaaattgctaggacagcagatcttaagtgttctcaccacaaaatatagtatatgaggtaatgcatatgtcaaatagcttgatttagccattccacaatgtgtacatttatcaacacaccacgttttacaccataaatacacacaatttttacttgtccattaaaactctgtctagtcatttctctgcacatgcgtaatgtatgcgtaaatgtatagtaccgaaacctgattgttggctattatcagatcatgaatctgtttccctgttacttaaaaaaaaaaaaattgatatcatcaatacagtagtctccccctatccatgagggattatggtccaagacctccaagtggatctcttgaaagcttgctgagtaccaaaccctgtatatattatacacaaatttctttttccttcacaatttcatggatagaagattcgttttcactgtaggtcttaggaacctcagcatacaattttttttcttttcttattaagtcaagaactctcacctttttacttaaaggaagcacttaagggcttctctttgccacgtgcgaatggccagcatcgttactcttgcacttgggggccattgtaaggtcaaataagagtgacttgaatgcaagtactgcattaccgcaacagttgatctgatgactacgggctactaagtgactgcggggctggtggtgtaggcagcgtggatttgttagacaaagggatgattgtcaggtgggacagagctgggtggtgtgagatttcttcagactactcagaatggcatgcaatataagacttatgaattgtttatttctggaaattcccatttaatattttcaggctgtagaaagcaaaaccatggataagcaggggggtggctattgtatttcaaagtattctagtaggtcagtgtactctagtagtgagtctcatagttaaaacatttagatttttctaaccttttattttaaataatgtaatgaagaacatccttgttaataaatctttgtagactttaaaggttaatttctgagtagatattcctggaagatggtttgcttcatcaaaattgtataaaatcccaaagattttcatactcgttagcaaatcacctttctgaaaggtgcaggccctttatatacccagtagtcaaggttaaatgtccacttccctgttccagccaacccttgatattattgtattttaaattcttcataacttgtattgactaaacatgtaattttctggttgttaacatagattcaaaatacagtggaaagtctcctttataaaaaccctacccactgaatgctacatttcacacgatcacccagatttgtcccttcagactaccttagggctctttgtcaagagcatatccacagtgaaacaaaatagcagaatatgtaaatgcttatagtttgaagactcggacacataaatgggatttgacctcattccaacaccttcgagaaccttgtggaactcttccttaaagatttgtttcatcttagagaagaatttttcctgctagtcttgatctctgacactcattgcattgtcgctttctgataatagtctagcaatgcagtatttcagtgctgttccttttagacatacgcgaagtagtcctcgatgacacatggagcgtttctatcatattctttcttaatttatccagattccaagtggtggactcacggaaatctgccgaaagcccgtctctcctgggtgcatttcgtctgtgtcagattggctcatttccatcggtctgcccatgtacgccggcaccctctccaccgcgggcttcagcacactgagccaagtgccttctctgtctcacacttgccttcaggaggccggcatcacagaggagagacacataagaaagctcctatctgcagccagactcttcaaactgccgccaggccctgaggccatgtagccaggcccggaatgggcctctctggacaagagccaccctttcactgtgcatatgatgctgatgcaattcctccatcatctctggacgtgcagaccagatccagaagaaaggcctggcgtgtggccaaacagcgtgaaaccttggcacaggactgaggatcctctcctccagaaaagccccctcgaggaaataaattagtgcggttctctttgacccccaaagacaagacaagcacttatttttattttcagaagacaaaagaaccaagatgccaactggctgcgaatgctctatctccagtctgtctctgtgtactggtagaggctgggaggagtagggggcagcctgttccatttctgatagtgcccttgctcttctgtctgtcatcttgcaggatgcccgagggccagatgggcttagctaggccaaagtaacagactcaagagttattgtacattactgaccacgctcatttgttcaaaagttagaacatctggctgcaccaggaaaaaaaaaaaaaaaaagtcctgttcttctttagataaacaagagacattttcataattgctttctagcaatcagcttttatttgccttaatataagcttttaagcagttatctaactagtgtccacaaccctgtaaccatacttccacatcttcagcttaggcagacatcgaacctctctgggatgtttccagcaaaagtgagcttttctaatcgtctcattgtaacatggcttattttgtagaggtattcatcagccacacacttcatgttggtttttggtttttaagctaactacaaatctagtaaaaagctatctgaaattcacaaatatcatgtgtgtgcgtgcgtgcgtgcgcgtgtgtgtctgtattcatagtgactgcttttggttttaaccagtttagtatcgttactgtgtggatcgtcgcgctgcagtattgacttggaatcctgaccatgtccatcccaaaattcagtcctcagttaacggatcatgtttgcaaaaggtcactgtgaggctgcatatttcagaaagatgtccttaataagggaagtcatgtataagatgttttctaaaagacttttcagtattacaactaatactattattatccttctttttttatttagataattcttttaatttaaacaaaggttcactatggaaccagacaaatctcattagccatgtgttaagtatttgctactttaaattgttttacaactgatttcagcacattctatccttttttttttttgaaatggagtttcgctcttgtcacccaggctggagtgcaatggcacgatcttggctcactgcaacctcagtctcccaggttcaagtgattctcctgccttagcctcccgagtagctgggattataggcacccaccaccacgcccagctaatttttgtattattagtagagacagggtttcaccatgttggccaggctggtctcaaactcaactcctgacctcaggtggtccacccgcctcagcctcccaaagtgctgggattacaggtgtgagccaccgcacctggcctctgtcctcttttagtctagtgtctggttttctagcaaacagtaaatttaaacaagtaaactattatggtttccattgcttacaaaatgattttcctttacattcttatcatgaacactattttaagcatcaaatgcaatcatctaaaatataaaggtcaatcatttataatagaaacaccttgaccacaagcccttgattgaacattttataatatttcatctacttattaaaacaaataatttcccttgggttggaggggaagtgatttcataaattaattagaaagccatctttagcatattgcttatgtctggatccatgtttctgaggaaaaagacattctcaggtgatgtatttttttcatgcattagtatgcatttttaaaaaataatgcatgtttctttaataattaattttcatcttctataagatgccatgtgaagaagttgtggaaatgtagaataaaaagctaaagctgccaaatttctgttgaactcttaaaaacagctcatgtttgtttgtcctctcgggttgtggcctagcctatttgcaatgtaatgaagctgcagggttcttgtatagctaaagcgttcaatgcatttcacgtgctgtggtggatgtgggtgctgtagacaggcttcttctcttcctgctctcaaaatacctcggcttgacatttggacagatcctgtcattgtttaagctgagcaaaaaaccacacaaaagttgtgtaagagatgagataacaaaggagcgagagaaatctcatgtgaatttccaagttttaattcgttctccatgaaggattttcatttcagtgaaagtcgcagcagaagagggaactttctggagtttttgagaatgccaaaccacatttttatcacacttctttggaaatcaatgcctttgcatagaaaatcaaattcagggaccacaaagaattttcagtgggaatgtctagtctgaggggtctgaggttgtttttactttattgtgttgtttaaatattttaaaaatatctttagcgtttggtcttttttttttctgtaaacatttaatttggtctgagaaaagctgaatgtttgggtgtgacgtttgactgaggtggattggggctgcctgtggacattagtgaacaggtggtaggcttcaggaatatccagttttaatcagttgcatttggtacagaattttgagtaatggtgaaaattgttgtctttggaaagcacaaaagaaacctggaaaggcagttcggctcaggtagctacacataacattgtgtatgattttcacttcaaagctgtctggaaggaaatgcagtcagctccagctagtactatttatgtacccagataactaagatattgtttcatggccttgccttagtcagaggcccttttctctgtcctgaacccccaggtatgggtgaaattggaaattactaatctattggaaatcagttcctgacatagtaaagtttgctttcataactgcagcaaaaaaggtcaacttgccaagtcactgctgccatgtgtgtactgtattattttcagaaaaaaatataatagtctgagtccaagttatcttgatttaaaattgatagagaaaagaaactgtcgagcaagttatataacaactaacaacattgcactttctgtatatgaaatcaatatttaaataacttatttttctccattgctgttcttaaaaacattgtaagtagctgtaatataccagtaccaatatgttcttgcaattgcttcagcccaagaaagctgtgtattgttttaaaaattgtaaaaattattgtgatgattcatttagcataaagagaggtggacggaagggttttcctatgtatcaaaacttgtctataattatgtcatctatgtacctagaaaaaagtaaataaatttcttcagttgaatatgccttttttgttgtttcttgggtattttaaagatgaatggagtagaaatgaaaaggaatttataaagtggtcaaataatgaaatatactgggaaaattgtagttgtctgcaattctgccatcaccagaactcaccctctgacatccacccagattctctttgccactttattgctttattttcaaatatgcataatcgagtcatataatgatagcaccttagaccagcaagatattttttggaagtcatcttgagtctaagattatcattttcaaatgaagaatctgagtccatatggatgattgacttgctcaatattatacagctaaatgacaccaccacccatatcttctactgagaaagaaaaaacaagtctaggtctggatagcctagaaattaatcaacatgacaataatgggtttttaatttcagcgtaccacaattgatacaaagacacatttttaatagggagaagagggtgtttgtaataaactttgagaggtaatgtatgcatttgagaaactatttaaaaaattaccatcttttcagagaaactcttctgtatttataaatataattgcatatgtatttcgccatacagaaatgagagcagatttttcatgctattcaccatacttctaaatgaatacatcttggaggtcctcccatgtcaacattctcccatttccttaaaggctacataatattctattatgcaggtttaaccagtactctatgaaagtgcaaccttctgctgttatagaagaaaaagctattgtggatatcactatacctatatcacttagcatgtggaattgctgtattaaagttatgtgtgtgttttaaattttgatagaataaggtgggtttcattgaagcttaatgttggttttacttttttctttctttctttctttgaggtggaatgttgctttttgttgcccaggctggagtgcaatggcatgatctcagctcactgcaacctccacctcctgggttcaagcgattctcctgcctcagcctcctgaggagctggtattacaggcatgcaccaccacacccggctaattttgtatttttagtagagacagggtttctccatgttggtcaggctggtctcgaactcccgacctcaggtgatctgcctgccttggcctcccaaagtgctgggattacaggcgtgagccaccgtgcctggcccacttttaaatcatcttactcccaactcctccaatccattttgcgaacggggatatttcatgtattccaggagtgagtgttctcctgactgctgcatcattttaaagaactaaccgtaaacctcaaatcttcccaatcccctgctaactcctaagattcaacagttcaaagaagatgctctttttcttatgatttctaggaaacccttgccagagtcttggtgtttcttgtaatctctcttcgtatgtagatacctatgatgtattcacttataaagaacattaatttgaatagggaaaga

SEQ ID NO: 532 - DNA, 204766 bp, Homo sapiens
  source 1..204766: mol_type = genomic DNA
aagaccattctagcttataagcaataattgtttaattcatagcatgtgtttgtaccacccattaaacaaatacatttctgtctgaagacaacttttgtgtgattatttcatttttcctggatttatattttgcctttctaacaagttataagcttcctgaggagaaagcacaaagtcgtacattctttgtcaccgcaatttctagcaaattgtccggcatagagtacatgtttaataaatgtttactgtctgattacagcatgattgtcctttagaaagaatgtggggaatttaaagtctttatttgagactcttcacaaagggaaataacagtgtaaagaaacatatgtcctctagacacacacacacacgacaaaactcaacccatgaagtgatcgctctgagatgctatgactttacttgagaaattcctactttgctttcttgaaaatagaagtcactagcagagagacaccttctaggcacaccaattcatgtgtgtgtagagcctcccactgatgaagtttgacccctaaaacacaatctcatgaatgtggaagctgcttgtgctaaaagtcattatttcacaaatgcttttcttctttgtctttagtctaaatgcagagttcatttacatttgcataaataacgtttcaccctgtgttgagcctctagctgtttttaaaaaccttcagcaccctgaagctgtctgcctttctgcaaacactcggttttcacaaattatcattaaaacatatctacatggttcatgggctgttaaaaaaggtaagggaaaccgaggaagaaagagaagttacatctgtatgtcaatcaaatgcagaaaaatggaaaaaaaaataaacaggaaaaacatttacaatatcaaaagaaaacaaaatcactttttaatttactttttctttgccagttctgaagcgaagcacttgctctttccttattaacattagtcttttgagcagttttttccattgtaagtactttctaaaaaatcattttcacacatttctcagatacatcaatcctttcagcattcctccatgcacacattatggtaccccagctctaaatataaaagacttttattatgtccattaaccatggacatatgtgctccaaaagtttcctgacacgcagtcatttgtggttttttaattataaacagaaaatattcactagaaaaataaaacagcagcctataaatatatctttatacatttgagttttgtttgtatatgacaaaagattggataaaggaagtgagcatgcatgtgtttatatacacacagagacacacatacattcacatgtgctattaaatccatgcactgtacaggactcatatatctgtaattgcaggtaccactgtcttgtttctaaaataagggtacaaattttcctaagactcaccaggtctctctctgcatgaaaaattaagtgggaaagcagataatgcccagtaaaataactgacaaacaaagtcatatttattgaatgcgtttattttaacaaccaaaaaattctaacagcctaacaatgcacataagttaaaaattaattatcacttagtgataacaaagatagttgatttacatggaaaaaagaacatttacaatatgttaatccttattcacattgttgataccgcaataaaacacaatttgtttttttcatttcacaaaaaaaaaaaaaggcgggaaattgtgctttgtcaagaggcactacaagagaaagtttcttcttccaaatagatattatatgacagatattgaataaatagacatatatgcattgtaattcgcaaagatctggcaagaccacaggctaaaatgcccacagattcacttagaaccactgcaaacttggcagtgaaattaaaaaataaaaggcaagacttagcattgaaaaatacctaataaatttttggttgaagtgtaaaagataccaaatgcggatgccatcgatagatgaaccaccttgtaagagcttggcaaaatcagtttccattacgtgtacagagtgaccttcagcaacagtgtaagaagacaatttggaaagagtaactcggagatcaggaagcagcaaccatggactttctgattaaagctgcagcatactacagaaataggaaggatggggccagggctaactgcaaacaaccatccttttgcaaaggtatatgacgcttatgtcaagataatttttaaacatcattatttgaaaaagtacaggaaaatgtccctttaaaaactccagaggttactgagcagctagaattagcttgtattgcaacatgtcttctccctgtatattgtaagttctgagttaatatctacacatagaggttttttttttaactcctaccttttatacctttcaaatatataaatagtattaacagttatattacaatgtttgtgtagtaaacagaaaataactttcaaagtgatattgcatgaggtctttgacaaggttttgtgaaagcacaactcaaaaaaaaaaaaaaaatccaaccatgtgggactgtttaatggccagtttaaagcatggattacgttcactaggccagtcctgaatgtgaggtctcctcttgcaattactgtaagtagaagtggaaagtaatgcttctggtgtttctcataggaagccgaaagagatctggagtactatagtagattgcagctttaatgctcatcccattaaacatccagtcagcattagttctgctttacataaggtaattgcgatgtaggtaactgggataatgttttcttttaggatgagtaagtgattctactgaaatcgcttcacatactctattgcctggagctgcacaacgattcaaaaacagttcttgttagggctgtcatcccaggaaaagggacaggagagatcagggactgaaaatgtttgattaggtagatggaatgtgtacgaagaagaggaagcccaaagtgaagcagaaatcagaaatgtcttttgggagagggaaggatggagatttatttgagagggagcccctttaactgggcagcaacttcttttctaacttaatattacactgaactattttctagtaaaaaacaaaaagacaaaaaaacagcaacaacaaacaacttttaaacgagcaggcttattaattttcagatttgaagccacaagcaggtaaataaatttcacaacaaaatgtggctcatactatgaattccatatgtccaatgtcaaaatgtcatttgatcaagacttgcactagtggacaaagttttctctgcactgaatttcagttttacttatttggaattccacagaaatgcatctgttcactacagtaatgacaaattgaataacggaacgtagcaagtcattttattgagtcattttaagtgtgcattgtgtctttaagatttatttgacttgtatcattttaatgtgccctgattgttttcacttcacttttttttttttcggcagtgtcgtttattttgttaaatacatacctcaaaaattacccattaagctgccagataggaagccatagaattaaaaaaaaaaaatcagggacaaacacaaaaaataaataggaattcaaaaatagtcaccccaccctgagagcaggccgcagtttatcaaaaagccaaagcgactcactgtgaagtggtttttttaatacataaacaagtcttttctttaagaactcatttcacagtctattctttcggattgcaaagtctctgtcccatgcaattttaatatatatatgtaaatatagagatatatacatatacatatacacacacacttgtagcttccttcatttatttcatagttcttttcatcctggtacttgcctgatgtaacttccgttaagtgcaaggataatgaaggcagagtctcctgtgattataatgactatgatccagtcatagagacgggataaagtgtaacgctttagtgtctttgccaaggcgatgtctgattcggaaatactgaacttattcagtctataggtgtatcctgtgcaacaaagaaatgtccaaaagggtaagaaaaacaaaacagacataaaaagacaaaaataaagccaaaaaaacccaaaaacaaaaacaaaaaacaaactaacaaaaaacttttaaagaaatgaaagcagaaaatccttggaccgatgtattgctttgcctagtagaagttcacattatctctggtcaatttcggcaggtgctgccttgcttttgtcagcattttcctcctcagcctccactttgtacatctcctcggagccttcctcgctgtcgttctcctctgactcggtcagcagctcctcgtccttatattcagccacgtccaccgcggagcccaggtgctctttcagcttcccgtggtgcttcacgtggtaccgctggttctggaagaacttgatgatggtgtgtttggggagatccagctgagccgaaagagtgtggatggcttcctggtctgggtacaggcctacatcatgaataaagctttggaggatccccagggcttctaaggagatctttgtgcgagaccggggctttttggcacaactgtcttcagtcggaggaggtgggggaggcgcttcttctctgggaggggaactctccttggctggctgagactgctgtctatgaagtacctgataattaagagagaaaaaaatgaacactggactcatgattttacctttccaaaaccatcagccctctgaaatatgtgttatctatctagcactggaggtaagctatagtcatttgtaaagtcaggtctttggaaagcttaaaagcatttctggacatttagtatctcacctacaaaacaggaggttcataacagtagtatttgccatcatttatattctgagatgcaaagtcaagtcatttattgcctaaggtcatctcactttaggcaacctggcttcagagtcttctatacctgtaaccaccaagatatgccacctctctgaaggctaacgacaaagaaattgggcacaaaggggaaagtatggactctatcatcatggcttcaagttcatattcttccacttagctgagtaaccctgggcaaatcacttaatatctttcagcctctatttcatcatccataaaagtaggataagaaaccaacctcctagagatgttgtaaggattaaatgacataattgttacaaaaaacagtgcttgtcttaaatcagggattggcaaactttgtcaggaaagggcaagatagtaaatatttgaggctctggagggtcgatctttgccacaactactcaattctattctattgcaaaaacaaatgaacatggctatgttccaataagactaaatttggcccatgagtcatagtttgcctcatctctggcttagagcaaacatccaataaatgacagtaattattatcagcttcataatgactcttacagtgttatagaggaataattggtacttaagccagaaaatcaatcctttgtaaaattagaaatgactttatattcttttagttctagttttgagtcttttgattttaaatgtattttttagaatgagaaaatattcaaactaatttaaagacataactgtttcttaaattatgaatttaaacgaccattttatacttaacatagatagaccttctcaaaatcactataaactaattaatcctctgttttgcatatactttgtaatttctgggttttttttctcctaatgttaaagttttctagttgtaatttaaataatttttcttttatttctacctattccccactcatttaataaaaaagcaaaatcttaggtaagcttactcaaaggaactcagtcccggctctccccacaggcctatgtgagaaggactttgtggagggggagatggaacatgaagtcctgatgaggaactgcagccatcgcccacaccttacagcttcagctggatgacagaattacaaggttactgtgctcttccccactaaaatgtgtcatgttggctccaaaggcaaagaccacatttcctatacttaggtcagtgcctaacttcctaaatcctcccaaaacttttaagaagagtgagttcactttttaaaaaacacaattctccttttactattctctcatattttatggatctttttcattttagaataacaaattaaacattttccagagttcaggaggaataaatccaaccaatgcaaagaaaacacgtctagttacattaaaggaccattcacactaccatccctgccacctttcctgccaccaccacacactacccatatgatccatgtcttttagctatgaaacatcagcatcaaagcaagcatttaagaaaaaaaaaaatctgtcattcatcctggtcttgaaggccatatgatgaaaaaatactttcccaccaatgtgaaactgtcagtcttttatgtagaacttaacaaatattagggcggatgaaactgttacctaaataaggtagcaataaacaaaagaagtttaaatttttcaagtaataatcaataatcaaataataataaaaaggataatcagaagcaaataagactatctgctataataagctgacggctagtggcagaaagaaatcctaagcacaggactataaaacagtggcactaaagtctgcataatgttgaccaattaaaatgaatgttcttagcattttccttaccactttcaactaagagtaaactcatgtggtctgttgtggtaagctggcatcagcaaaaaaagtgagagctccgttactttagcatcctaattatacccggcaggaaaagcagagctccagggatggggggtggggggactggtgctggtcaggtccactttcatggcagaaggatatttgctctgaggccatgatctgggcagtatgagcactgcaataagtaaacctctatgtcaacaggtgaggattccaattttgggggagagagagactgaaattatgtgcaaagtatatactggaagaacatagactcaagcatgagtactccccattagagcaattgcgctaattggaaaacaaaagagaattaaaatgccccattttctaaattatgcttgccttctgtagtaaaagtcagcataacggttccatttaattgaataattagattggttcttcagggattttccactgtgcactggttagatttaaagagattttccaaaactatactttgaagttactataatctttctgcatgattgcatttgttcttctccttaggtccaaccaactagcctgcttcactcccctttgtttcctagaactgagcactagtaatacatatgtacagagaagccaaacatgaaacagagaaagaacagtaagaatagctacccctcactgaatgtttattctgtgccaggcagttctaagaacttcacatggattaattaactgaatcctgacaagttcctcacaaaggtgctatttggattcaagattgaactggaaacatgtagcatctcctcttaattccaattcggaggattctcctccgaattggaaattacaaacatggggagttgtcagtctgataaagaaggtttccaggggacaatgacaaggcaactgcccatgacagactaggaagatgtttctcaagagaagtaatagtcagagaaattatctacaaagtgaaatatatagtttctggtcagacaatgtaccatagtgggttgggcaccatgatgacatctacatgaagatggttaagttatatcttctagcatcttctaacaggtaaggaaagagcagtcaaaacagtgaatgtccaaatgggcatctctaaagtgaaactgtcttacaagttagcaaaggagctgagctttttctattatactgacacttttctttggctataagtccctttcaaccgcaatatacataatatctgagattaaaagattcccaaagttatctgtcctaactatctgtattcccctaaaatgttctaattactccaggcagagagttactgtctctagacaattcctagcaaaagaacaacataatttgctctctagccaattgctaagaatccttcctaataccatgtagtactttattctagtggtatacgtactctgagtgaaaggagagcagtacctaatgcctataagatggtcttctctaggcatgaaaaccaatccaaatcctcttctaaaatcctcccatctaaaggacagaatcaagtcatcttttcttcactttctcacatcttgactaaataatgtcaactcttttagccatttcttcacaggaaaagtttctgaactctcacttaactgatatttcgatttggtgttttgttttgttttgttttttgtctgaatctctcagaacatcttctaaattccctgttagtgaactagaacgaatcaaatttggtctctgtcccaagcaagtgccctgagagtcatgccattgattgctgatggagagacctataagcggtttcattcctaggctcatttgacagtttgggcataatttttttgttaattaatattttaagtcacaaaattcacaattactccaactaagagaatgccctgcaaaatgaataaaattctctttccaaactagtcctttatgcagtcagattataattttctgagattttctttatattaatcgagcatctttccaacaatttatgaaaaagctggcaggaccaaggtctttccagcattacctttttcccttttttcaaaatgggcccagtggaggggcaaaaaaaaatccccattgatagtacctactaacgccatgcatacaaacactgtataaaaccagaaatgaatgcctatgtcctctaaaacgcatgctcatagcagttttagtcatcaccagaaacaacccaagtgtctaccaataataagatcgataaataaattgtagtatacttatataaccgagcagtaggaaaaatgaactattgctatatacacaaacatagataaaaacagacttactgtcgagtgaaagaagtcagatatgaaagaccaaaaactgtatgattccacttatgtgaaagaataggaaaaacaaattaatataaaagagtagaaaaaaataggaaaagcctgcattgacagatcccagcataatgggtttccactgaggtttactgagtggaagcgggtggaagatagccttctgggatgttgcaaatattctctatattgacctgtgtgtttgttaaaaggatgtgtgtatgtctaaaagattatcaaactgtacaattaaaatctgtgcattttactgtatgcaaactataacatatttcgatataaaagtttaaaaaaatgggcttagtagttgacctttatttatccctaaggcaaacacctctcttcatgtgattttcccaaataatggaatatttaattctgtaagggtaactatccactcctttttactcttgatctttgcacactgaagcctatcaactcatcctatttctttttttggtttggatttttctccatcaaaattaaggttaatctagacaacaaattcatttctgtaaagagagtcctaaatggtttatttaaaagcctttctttttcatagcttctgctgttgatttttcagtatgacaggcaaggttcacagtaatgaaatatctaagtagctttaataacaataataatagtagtaataggtgctaccattcatataaagcttactcatgagacacacattgacctaaatgctataaatatattttatgttattaattttcacagtactcttagaggcaggcatttttacccccactttatgatgggaaaactggagttccaaaagtgtagataatttgtttaaggtgcagagtttgcaagcagcagaactgggcttgtcaagcatatcttattcaagcatatgttaaagcccatgcccttaaacattatggtctcctgacttctatgagtaaaatatagagaaaaattgaacaaagtctttagagtagaggagatagatcgtaaataaaatatcagctagtaataaatacatagagcaatgcataaggaggaagattgtggggaggggaagttatttgagataaggtgactcagagaaggctccctacagaggcagcattggagcccaggcatgaagatgtgaagcccagccatgtggaagaacattccagataacagaaaggcaaacaaaaaggctgccaggcaagaatatacttggtacaattgcaaaaccgcaagaaagtcagcacgttagagctgtgccgcccaatacagtagccactagccacatgtgggtatttacatttaaactaattaaacaaacaaacaaacgttcactcagtcacatcagccacattttaagtgccccattgtgtcacttgtgcgatgccatgatggatagcacaatacagagcatttcccttagcacagaaagtactgttggatagtaccatgctccagcaaaatgacacctgagagagccacacggccagagcatggagtgcttggcattccaccatcagggtaatggaaagccctcacaatgaacttcaatcataaaatctgagatagccaaaaatatactaagacctgaaaactgctactattaccagagagatgggaaaatatttaaataattacttagtaagaaaaattcagtttgtaatatagcactggatttttatcggagtattacaaatagcaacattgtcataaacacagccagaagtatgcactggcacttctaccctcaaaagaatggttaatttacatttaactgattgttgtcttcttcatcagaggtgttcatcatatctaaaagaaatgatattaaaaacagccctgggttaaaagaattttttaaaaagtatatccatatatcaaacatttatggagtatctacaataattggacctattaatttacacagctttttaataagaagtcctatttccaacaattaaggtctgatgaataagttatgggtaggaataaacaaatagaaagttaaaagtctagtaagtttcttatttatttgctgtaatctctctgggctgaaatgtgacacatatgtctataaatgggcatgaagatggcaatgaagaatgagaagttgtaaatatactcaaaagagacattaactgcaaatgaaacccaaagttccttgcccagtcataaagcacaattataatatggacacatgttgtttctctgctttcaaaatttgaaaacaaaaagacctaatggtaccatgaccaaagttgactaagaaagataaagcagctcttcttaaagctctcagtgttcaaatggattctgaaggcctcaatgaaaaccagctgggagccaagtgtaaaatataatgctttttgcctgtagggaaggaagtgagatcttgaatgattaagtttaggaaagtatgtaattcactgtatcattatggggtgagctggattacttataatatgccaacactttgtggtcttcttttatagagaaaatgagaaattattaaagaggtgactgtataaggtggttgatccagtgtagtaataggttaaaacagtttcccaggtggtcacgtctgtctctctatgacaagcctcacccaaagcttcaggtcctgtagggtaaggtatattcataggagatgagaacacaaacaaaatgacttttatccacgtttattttgggttaatattagaattattttgacttgttgtccaattttacctcattttttagaacagaacataaactgtgatccaaaaaaggaaagcattatcctactaaaagttccaagaaaaatatacttaaggtcaggcacggtagatgatgcctataatcccaacactttgggaggccaaggcgggcggatcacttgagttcaggagttcaagaccagcctggacaacatggtaaaaccctgtctctactaaaaatacaaaaattagccaggcgtggtggcacgcgcctgtaatcccagctacttgggtgttgcgggaagtcagggaccccaaacggagggactggctgaagccatggcagaagaacgtggattgtgaagatttcatggacatttattagttccccaaattgatacttttataatttcttacgccgatctttactgcaatctctgaacataaattgtgaagattgcatggacacttatcacttccccgatcaatacccttgtgatttcctatgcctgtctttactttaatctcttaatcccatcatcttcgtaagctgaggaggatgtatgtcgcctcaggaccctgtgatgattgtgttaactgcacaaattgtttgtagagcatgtgtgtttgaacaatatgaaatttgggcaccttaaaaaaagaacaggataacagcaatgttcagggaacaagagagataaccttaaactctgactgctggtgagccgggcggaacagagccatatttctcgtctttcaaaagcaaatgggagaaatattgctgaattctttttctcagcaaggaacatatctgagaaagagaatgtgtccctgagggtaggcctctgaaatggccgctttgggggtggctgtcttttacgatcacagctgtagggatgaaataagccccagtctcccgtagcactcccaggcttattaggacgaggaaattcccgcctaataaattttggtcagaccagttgtctgctctcaaaccctgtctcctgataagatgttatcaatgaaaatgcgtgcccaaaacttcattagcaattttaatttcgcccctgtcctgtggtcctgtgatctcgccctgcctccatttaccttgtgatatcttattaccttgtgaagcatgtgctctctgtgacacacaccctattcgtacattcccttgccttttgaaaatcactaataaaaacttgctggttttgcggcttgtggggcatcagggaacctgctgacatgtgatgtctcccccagacacccagctttaaaatttctctctttgtactctgtccctttatttctcagactggccgacacttagggaaaatagaaaagaacctacttgactatcaagggcaggttcccccgatacttgggaggctgagacaggagaattgcttgaacccaggagcgggaggttgcagtgagctgagatcacaccactgcactccagcctgggtgacagagcaagaccctgtctcaaaaaaaaaaaagcatgtgtgtatgtatgtatgtgtgtgtgtgtgtgtgtgtatatatacatatatatgagaaatcattaaggaggtgactgtataaggtggttgatccagtgtagtaataggttaaaacagtttcccaggtggtcacgtctgtccctctatgacaagcctcacccaaagcttcaggtcctgtaggctaaggtacattaataggagatgagaacacaaacaagatgatatgagatatatacacacacacacaatttttttttacttaaaagtaacaacaattggttgaaagtccttatgcataactcaattagaatttgttgaatagatgattgaatacatgctattattttttaaatggactatatataaaatatcatgtaattgaaagtttcaaaaacctagctctaccctctaatattccccttttttcaaaatcagcattaaggacaattaattttggcccaaacattcagtaaggagaactttaatgattaataactaatgtaaatatcaatgtaattattttatgtctccgtcactgttggactgtgagctacatattggcataccatatgcctgggacacaattagtgctcagtatctttgttctgtggcgctgcattccatattctctctctttttttttttttttttgagacagggtcttgctctgtcgcccaggctggagtgcagtggcgtgatctcagctcactgcaagctccgcctcctgggttcatgccattctcctgcctcagcctcccgagtagctgggactacaggtgcccaccgccacacccagctaattttttgtatttttagtagaaacagtgtttcaccatgttagccaggatggtctcgatctcctgacctcgtgatccgcccaccttggcctcccaaagtgctgggattacaggcgtaaaccactgcgcccggcccatattctctcttctttactttcagatcagttactattcttgttcagcaaaactagttattacttttcttgctattattcctttttagcaaaagaatgtttaaaaaataaagaagctatcactaattacaggaatttatatctagtgtgtatctgagagtagggatataattcttttctgtgtaaaaaaaaattcctagggcactgtataacctataagatggcattgtatacacgtggtaaggagaagttttgaggtcacaaagttctggtttcaaatccagtttctactgcaaaaccacaactgcttagttactagccttgtaattctgagcacgttacttactctctctgagccacagtgcttgttaatctgtaaaatcttccttgtagtgctggtagtgttaggagggaaagtgagataatatatgctaagtatgtagcagcaaagttctgaagtcataagtagggtttcaattagtagtagttattacaaaacgtgaggagtatttaagaatcaggagtataatgagtcactcattttttctatcaacatgcttattataaaagcaacaaattcagaaacctttttcaccccacagatctacaaataggcacatctactgataacttttcttatttctttcactcaaatactacatacatctttgtacttaaaatggcacctggcacagaaaagttgcctctgaagcatatgttacatgaaattgagcctcaagttacagtctgtttaaggtgacaccttctatacatacagcctgacatcctcttaggaagacattctttatcaatgattctcaaagtgtggtccatgcaataggcccatgccatcaaaactattttcatagcaaatccaagacattatttacaacataaacataaactttttttttttttttttgagatggaatctcactctgtcgcccaggctggagtgcaatggtgcgatctcggctcactgcaagctccgcctcctgggttcacgccattctcctgcctcagcctcttgagtagctgggaatacaggcgcccgccaccatgcctagctattttttttttttttgtattttttgtagggacggggtttcatcgtattagccaggacggtctctatctcctgaccttgtgatccacccacctctgcctcccaaagtgctgggattacaggcgtgagctaccacgcccagccaaacataaactttttgaccttgctgaaattcgccgtgagctcatggctgtgaaaaatacaactgcctggaccatttggtgctgctgccttgattgttgcaagccagcatttcccaccagtgcttttgtaccatctgcaaatttcagcaaagtcaaaaaggtaaataatgccttggatttgctatgaaaatagtttcaatgttgtgggcctattgcatagaccacacttcaaaatttgccaatggtacaaaagcactggtgggaaatgctggcctgcaacaatcaaagcagcagcaccaaatggtccaggcagttgtatttttcactgccacacgctcatggcaaaaatgatgccactttcatttaagagcatctttgatgaagcagtaaaattgtattacttaagtctcaatccttgagtatacgtctttttaatgtactgtgtgaagaaatgggaagcgcatatgaagtacttctgtagcatactgagggaagatggttgtcttgagaaacagcacttgtgtcattgttggacttgaaagctgagccacccatctttgtcatggagtatcaatttgacttgaaagaacaactaaagacaaactatggttattcggatctgcatatttgacattgttttaaaactaaagtgagcctatcactccaggaaaaatatctgacagcatttgttgccaattataccttttaacctttcaagcaaaaattagagttttgaaaaacttgtagtggccaccatatgcttaatagtttcccaatacttaacttttttgatatcagtggtgatttaacaaatatgtttggttttgcttttaaatatgtcatataataaaatgtgccaacatttgtaagggctgcataaccttacaaaatacagtaaaccagtattttccaaatgcatgcatgatgttataaagttatgaataggtaaaagaaaaagtatgaaaagttcatcaatatagttttagattcaattccactttgcaactaaccattaagaaactaccacttgtagaatgttgctctagtatcaaagaagaatatcacaattatctgaaatgcagattaaaatattttttcctattgtaattacacatctacctgaggctggatttgcctcaccagcgtcaaccaaaaccacatattgtattagattaaatgctgaagcaattatgaaaatccagttgtctttcattaagtcagactttaaaatatttgcaaaagtatataaaacattggcattctattatttttctgttttgaaaatatatttattgtgaaataaatatatcatttacatatatgcatttatagttggcccaccatatccatgggttccatacctatggattcaacaaaccacaatcaaaaatatttagaaaaaaaaaagaatggttatatctgtacctaacatgtatcaactattttttgtcattattccccaaacaatatagtataataactatttacatagcatttacactgtatgaggtatcataagtaaactagagataattcaaagtatatggaaggatgtatgtacattacatgcaaatactacaccattttacataaggggcttgagcatccatgaattttgttatctgcaagaagttctggaatcaatcccccgtggatacaaggggatgactgtgtattatctataattatttttaaattagtaagcatttaaaaaattcctcagaatttctaatatggtaatattcataaatataacacattattggggtcctcaatagtaacagtgaaaagagattctgagaccaaaaagtttgaaaactttggatgacatgaatcacactcaatagtaaaaacatccttacttgagtcaaatcacttaggaaagccttagagaaagagtgtaggagaaaatcacttaggaaagccttagggaaagagtgtaggagaaattacacatgcattatgatttgtctcctgactttatcacacaaagacattttcacaggcaaaacatattctcctagatacacaactcagcactatttctaacttcaaatgatgttacttaagttggctcttatgattgtaatttcacatcctaacattataggacttattaaaaaaccatggtttagctttgttgctttatttggattacacagtatcctaaggtcaaaactcaggaaatctgttattaaaaaaaaaagtatccatgaagtgatgacaaattgcagactacaggtgttagattacattttgactccaggcggatttaatataagttggttctcttttacaattgctcttagcacatacagctataggagagggatttaaaaaaaaaaagagagagagagagaaagagaataagaaaaaaaaagtggcagtcaacaaaagaagaccatgtcaagagaaatcaatacaaacaagcaaaatggtaggaagtctgacatggaaatatgtgttcaatttcatccagccttagtctgttttttttttttttttttaaatattgtaaccaagatactactggaacactgtgtatgtttttaatgcagtttaataattgtttctcaaaataaacactttggtcaaagataaaagcataaaaatattgtgacacaataggctgttaaacttgggttttggaggaagcatggttcttaaaacagcctttggcttatatcatttcctctttggttataaattgagaacaactataccaacagctttggtatagtttggggaaaaaaaaaaaagtatcacagtcattaatctgattgctgggagtggccagaatctgcaaatactgaagaggtaggtggctgagtgaaatgcttcttcaatataaggagatgaggaactatatcaaatagctatgaagagagtatagaaaacaatccactctccagttagaacctgaggaaaagcatggacacatgatgtacctagtggcaattatacctttcccttaatcagcaccatctgagaaacagatttatttgatcatctagggctaacatgaccaaaaccattccacaaaaacaacaaacacaatccatgagaagacttgggaagaatgaccaaaaccattccacaaaaacaacaaacacaatccatgagaagacttgggaagaccggaccctttaggacagtccgggctatgaccatgtgtccttatgcctgggagataccatccccagcccacccaccacacgctcacttgcctgacatccataagcactaatttctccctgttccgacactcctccaccactcttcacaaagtattctcagaacacaaaacctagcctaaaaattcacaggaaaggcctatctcttgaagacccaattcaaggcacagattaaagtgtctttaaagaccttacatctggttaaaacgaataaagagtaagatggaaatgagcagggtaacagttacctctaggattctgatttttaaataaatgtgtgacttgcttcatgggtataattgcaaaaaaaagtggcttttgcaccagcatacatgaaagaagatactcttaagttaaacataaccaggtaactaaatgaggaagatgaaaggttaggatgacttggtaccacacgatcccaatgatattaaaagaaccaacctggaaatttctaatacttcagcaatggcaaaaggctaagaaagaaagatgtgcaaagggttcagattaagcatgatccctcagaatgcttaaatagttaatccagctggctctataattctcaagtgaagtaaaaatgtgacccaaatgaaaataacttcatcaatgccagtgacacatgatttgtgagctttgaaacttgttttaaaacagattcaaggtaagcttaaaataatagaatagagaccacttcagataaatacatttcacccagtaaatttaaccagagcagagttttaattccttttaaatgaaaatgttttaagatatatgaaggaaaagaatagatacatttaataagaagagacatcactcagtcagccaagaattgtcaatgaagacttaaataatgattcctaaggtaaagcaccaaagagtcagaattcaaaccatttccaaatcccttcatagtatttataaatctagtgatgaaaaatataaattgaaaacacctatttagaataggatgatttagaaacaaggataatatggaggggtgtggtggggggggagattatctatgtatactttcagtcataggatctcaataaattatgtaagcttcactgaaataaagcattactattactgatttacacatagattatttaatatgactccatggtcgtatatcaaatttctgtaattatttaaatcctgtaattattttcaaagctctttatcatcttttgtttttcttacttcttaaaaagaatgaaataatctcacaatattggcaggtactactgcatttattcttcagaggaagaaacaaatacacaaaattgagctctgactccaaaatcacatacccccgagtctaacatgtaacaaatatatgcttactgctgtttagctagctaatggagaaaaatacaaaattatattctgtttcaatttaagtttttagcacaaatttcttttagtgtgaataaacaccttcaactaaaatctactagactctaagaataacactataaatgacagaggctattattcaatatttcaagtttggaattaaaagtgaaaacaacacaaatgttaggaaaaattagaatactttatggggaagtttctctcccaaatgtccatttagagtgggttataaagagatttttacatttctatctctgtgtaccatttttacaaagcagatacccagtttcatcaaaatttgctagcacataaagagagacccttcctgacaaacctcagccaagaaccagtttaggatttaaaatccccataactacaatggcactagtgacatcacaactgaagtgttttacagcttcttaaaagacagggcttcaattatttaaggagaaagcatgtttggaagagatgctttacttcaggggaaagagatgaaagaaggtaatccatgtgtttgaagcctcacatgaggctatttagaatcccacattaggccacattttctgtataatttttacagttggggtactcagaagtcagaacaatctgacagttatggttagtgaaaatattagatgttcaccaagaaaatactacctcagcatattttttgctttctgaatgtaaccacttaataacaggacttgagaaaactgcactgtgtgaatcaaacacataaaagtacaaatattccttttatagaaagtaaatcttaaggagtgcattataatcaaccactctggtaaaagaaaaaaaaaatctagcattaccacaccactgacatattatagtttattatacccagaagtccaaactgggtaaacaaagtcaaatgatcaaagaagggttttcgcctcaaaccatgaggcagaggccattgatctctagggagaggcagcaaagattcctggtggcttagctcttaaaaggtatcaagtgagagcttatcagacatagcctttagttttcaacttcatttaatttcatcagagactggctttcttggtattattttcttgcaagagaaaaataatatggaaaaattaaatatgtgaggtagaaacttcccaaaagtttgggctcttaattctagggtaggcttttccattctaaaccacttttaattcattatgggaatattggttttgtatcctccacattaatgatcttactacctgaaaccaggtatggacagacttttgcttctcaactttgtggcaggtatatcgggtgagaagtgaaaagccaacaaggacaggcactcttgtttagatcaaggctttctcaagaaaatgagtctccttttcccaggggtccaaggatggtcactgggaagagaaatctcagttcctaattccctggggcaaagtaactggactagtaactccttttctcacaagcaagattccagtctccgagcagcagaggaccatgctactcccacaaggccattcagcatccttatctactcagattcacaaaacaagtccaattgtgtctccacacaacgttgccttggcttttctgagcatatttgcttaccctgtgtaggtcgtcttcagaaactggaactgtcaagttattatactttcaaatgtgaatacgcttcggggtggatttaatttaatagctgagaactcagtacaaaacaaacatacttacaaatgacattagcagggaattaatcgttaacgctcttgattggtgctccaagaccaaccccccaggttgctccagccaacatctgagagttctcactgactccttcccctcaactaaaactccacatctagttgatcccacgtgttgctgattattccttttaaacagttcttggattaattttcccttctccaggtgtactcccattgctgtaattcagactcttataatctcttgcctgaattactctgacttcctcccaacaggcctccctgtcacagccaaccgaacatcttgctaaaggccctcagtggccttcaggtggtctaggcctcttctgtgtacaagaaggccccgtaacctcactgcagcctgagcccctgctggtccttgctccccagcccctgccttgcaggctgtgctccaacaactctacactggagcccccagactcatgctgtgtcaccctttcttggaaacctctgatgatgaatctgtaagagccatgagcagcactacgccttggaagccttctgagttctccaactcaccaggtttggggcaggcatgccccttttgtgcttttctttctcttacttatacgctgtattatagctatctgctctcatatctgcctctccactgatctctgggctccttaagggtagattctgtgttatattcacctccacatactctaaacttagcacaatgtcaaggcactgtgctttgaatgaatatatacgtctacacaggcaatagccatattacacagactgaaagtcatccttaaatttagaacacatctaatagtcctaaggggaaataaagtattaaatctatgtaggcactcactaaaaatacacttattaccgaaaagagctgagttatcatagtttataataatttgatacatgcacacatacactttgtatacaggttaataaataccataggttaataaataccatactgactcacacagttctttaattcccaaaaaaatctgattgaaaattattaacactcaagaaatatataggatattcctattctcagggataaaaactgacatattcatcagtttgcttctctctctccctccccaatctgcagaaatatttctactatcactagaacttaaagggcctgcagcagacagcttccatgacaagaaaagttgctggaggcaaaacagcaaaacaacaaataaaaatgagagaatccatataagacaaacaaaggaaacctttaaaaacaatgcagaatttataaaagccagaagtatttgttaaaaaatggatcatatgtatcacaataaaattctgaattgtcaatggctcccaactgagcaaaatatgaaagaatattgcctatatacaaaatactatagaaaacactgaatgtcttgtccaaaacaaatattaaatgccagaatgattttctttggaacagaatgaacaaagagagactttgtgaagaaacaacaaagaaaaaaagtaacaaaattaattcaatgtatatatttttttgcccccactttgatttaacctctatagttccaacaccacatattccaaagtaagcaaagagaatggtttcaagttagagccacaaactgtctttactgctttttgcctgtcttcgtagcttacttagactttatcaaaatttacttctaaaaatatgcatctgaaactgaataaataatggaagttaagaaactctagaggccaaatatgagccatttcatttatacttgcagaaatcaaaaagcattttggcattaaacaacatttttttagggtacagtgcttttaagacattatataattacccttactgagagtacagtttttagctttgtcagggtctctattggaattataattccatgctgagcaacgagttctatcaaacctctattatcatattaaaacacttgagtaggccaggtgcagtagctcacatctgtaatcccagcactttgggaggccgaggcgggtggatcacctgaggtcaggagtttgagaccagcctggccagcgtggcgaaacctagtcaccactaaaaatacaaaaattagccaggcatggtggcacacacctaaatcccagctactagggaggctgaggcaggagaatcgcttaaactgggaggcggaggttgcaatgagccaagatcacgccactgcactccagcctgggggacacagcaagactctgtctcaaaaaaaaaataaataaaaataaaaacaaaaacaaacaaacaaaaaccacttgattaagggtaccctcaagattccaaactttctatttctgagaagagaacagatttaatgagatattttgaaagtagagctggtaaaaagaatatttgtgaaaagcaatgctaaaaaaaaaacacttcatagggcagaaagagaaaaggcaaaatttaccacacatagtggagcaatgggtattaaataatcatctctgaataaactctacaaatcaatatggtccttttggtctaaactaagaatgctattgcctaaaggaaatctctaaggtcaaccagcaattaactgaaaggttttgattgaaaatgctattgatggctttcatatcagacagcttcctggttattatactgcatgggctaagtaggtgccaagacattaaactgtcaataacctattaatactagactgctatgcttactctccccgaatctgggcaggcaaatgtattcaagccatgtacctgcttagaactaatgcaaattccccaaccctgatgtggaaatcatatctttattacctcccagtttaaatgtctagtagtgttgacagagtataagaaaaatatgcagataataaatgcttattcagatgagttaaactaacatttgtttttaaagagatggctaaagggatagagaacatgtcttggaatctgacttcctttctaagccatatttaacagtttctaaattgaatgtaataaacactttataaagagaaatgagaagttatttaaagtgaggcttataggtccttgccactcagcatctggaaagcagttatacattggggagtgggggagaacttttaatgaatttaatagagaaaaagcactttaattaaatgctgtcaaagtagattgtattaatgatggtacacagaggaattttaagccagccaagtttatttagcaaatagaaatggggcttttgaagcctgcaagtatttatgtttccgcagttgcagtacatctagatgatggtgccaaatgaaactgttgagttattattagatatgattttatttattgtgtattattaaagtttcaaaagccttaggggaattaatctcattttcaaaatgaaataccacatttgatcagaaagggttaagaaaagagaatattgtcccctaatttttttctgttccctggaattttgatgcaggtgaatggctagtgggaacagccttttctaggttcatgcagccagaattcactttattggacagtagtatggtagcaaagaaatcaatgacagtatttctcctgtgagtttttctcctgttttctttttttctagtgatttgccaccaaacataattcattccattatacatagcaataagctgaaaaatgaccaaagctcttaaaaatctccatgaaaatttggttgtcataactttccttaatcaaaaactcgagtagcccaaacttctacaaaggaaaaggtatcgaatgtttgacttgggggcaacaggaaaaaaaggggtctttcttagtattttctattcagaagttgaccacagaacaaacctattattaataatattttttaaataaacaaagaaaatatgagccttaatgcatgaaagctataaaagattgaaaagctggtctggctggaaaatactatgtgtgtgtcaaaatgattttctctaccgtttgtaaaaatgtaattatccatgatatgctattacccatgatatgctacaagggtgaaggatttcaagtaaatccattggaagctgaggattcgcttttggtattcagtctctgacaccaccatgtctgtgagatcacaaaccactgccatgatttaccacatccttcttgcagttatatatacaccctttcagcctgtctttagcttttaattcaaaacatgaaaaagggggagaaaggaaatgtgagggtgggagaaaaaaaacaaaacaaaacacaaaactcagcatctatttcctttcaagaagagaaaaatgatcacaaatactttcaactttctaaataatctaatttttaatgctcccccccaactagttattaatatcatatgtttgatctgtgtctttgtagttctggaatttataagtaactctgcatttcccatttctgccaagatgtttccgactaatctttgaaatgctgcaaatgtagatgaatatgacatgaaatagaaactgattacatacacgttctatatgtgaggaatggcaacacagaacacagatgacagttacatgttcatatggtataaagtactactctgcttcatatatacaaatatatagagatcatcaaagtacagcatgccacctctactacatctgtattaggaactcaaactggttgatttcttttcaacaaaatgacaagaaaatttcttctctcctggtaaatcagtagttctaatatgaagatctattgaagaattgtcaactgacagaccatcctgatgcatttgatccaggttatgttatacaaccaaagaatcagttaatttggttctttcctttcattactatgttaacttactaggcatgctgtttaactattttagcccctgtctccttgggaggctttcatttcccatgatgcacccaaataagagttcctctcaaaagtgtagccctaaattacaccacatggaaatatttgacattggcccaccacaattccttgccagtcttctcttaccacacttttgagtacaactattgacctgcattgtcaaaaaaacatgaaatgcaaaacactatacttaaaaaaaatcattgcatgtgaatactgcacttatgcagtacatgctcactttagcaccttctgctcattttgatcataacagaaacaggaatacctttccatattcacatatattcatctttaagagttcacatcatagattttagctccctaatttactttttttaaaaaaattgactcttaatttttgaggtgcactgtttgagtttatcatatctaaaaaataactgttaatttgttcctgttttctacctagactcctcaaatatcttgggtgtttggcactaggaaatcacaaattatggactcattatgctacagattctataaagttgatccaaccagatactcaagtgagctttgtacgctgcataagaaagaaatacaaagataaacatgtttgaacatgaagaaataaatttaaactaaagaaaagcatgacaaggaaagagtaggaacaactgctatttaaataaacatttttgttatctggatgatcaaatgagctgtattaccaatcagacaatcagttctggaaacacctgacttttctttcatacaattgttttcagcaagttttgtttataaaaaataaataatacacggatggccaaagagcttgaaataaaaaagttaactggagtctactcagtgtttcgctggcaaatatttaacaactgggtctctaaagaaaaaaaaaaagccccaattggataatccaccagtttttgtagtgtgaataatcccaccatggccagtttcacgctgccaatggtataacaaccagcttttgaaattctaaaaatttaacaattggcttctgcaagccagagtaggctttctccagcatactctgactctactatagagaagcaagaccatgttcctcctctgacaagccacatactgcttcccagacttgctcactgaatccctttgcctggcctgacttacctgtcattttcccagccccaaagtgattattaggatgaccccaatgtgatccacaattccataaaatattctatatcaaaaggtgaagggttatatgatttgcagtgaatttgatctggaaacaacttgtgaggaaattgaacttgtgaccttagaactgtcaaacctatctagtttgcttgatctcccatttctagggtcaaaccaagtaataataaaataaatgaatttcagaactttggcagttttcctttaattgaaagtgtgcttttctatcattacaaggggaagttccagacttcaacttaataaaaatcagcagtagtttgcagctacattagatttccacactaaacagaaacagctgagaagccacagtaggtaggtttggttacgacagtttaaaactcagtggctggctttctcttgcaattgccaaaactatcagtcataagaaaatcaactgggtctctgagtccaatataagatgttcataatctgttatagtgttgctaatttgtttttccaaaatgcatttgaacctcccaggagcaatgtgtttttgttttgttttgttgttgttgtttatattttgcaccctcattaaaatactcaaatggaaattagaaatggatgagccaactcacagtatgagtgttttagataaaaggggtctctgcaatcacctaattcatgttgtaataatttagaaaacagtagatggagtccaggcgcagtggctcacacctgtaatcccagcactttgggaggccgaggcaggtagactgcttgagtccaggagttcgagactagcctgggcaacatggtgaaaccacatctctactaaaaatacaagaaattagctagggatggtagtgtgctcctgtagtcccagctaccttggaggctgaggtagaagaagagagaatcccctgagcccaggaggtaaaggctgctatgagccatgattgtgccacttcactccagcctgagcaaccagagtaagaccctgtctcaaacaaactaacaaacaaaagaaaacaaaacagtagatggaaattcagagtgaaatgcctcatccaaggtcacacactcagccctaggactagactctatgtcacttacagtgcccttttctttaccatgtcatcttttctcttattgggtcaaaggttcattgaaactagaaatagagagtaatatttattctttataagatgctctggcctctgaaacaacacccagaaatcctcagtgtgggggcaataatcatatagaaaaattttaaatatttggaaactttttaaccttaaagccatactacacttagacttaaatcccagtcatctattttaaatgcacttcaaagtttataatcagaaaactctaatttcaaaggaagcatttgtgtttgtttctattatataagaaagatacgattttttaaaattaaaattaaatggttatatacattgccctgtggctttcatttataaagccatgacttgttacgtatttgttgtgaactacacttcaaataatttgttgccatcaatagttaaaatagtaaaatttgcaaatgttttacttttttgtttttgtttggtttgagtaaattagagctcatcctatattccttctacaatgacactagtgtatgtaagtccactcctgtttacctgcatacatgggagggaaagaggtagaattccaggtggtcattcccggaagagtcatacatgtgaaaataggccattagtattctcagcacagaggttccactgaagggagtcctgggatcacagcaagttctgcatcttcactctacttgtcacttcatatcctaattcatcttctggtagcctgaattcatcttcctggtagtctctgaggaactcaacaccagagaatatttattttcccttgtttgagtccaccaaggccagcacagatctgctaatgggggagatgcctatttaatactgcaccaaagagtctcaagcatcatcactacatggttctttcacaactttgtggatgctaatgggtagcaaggacagcagaagtctcagagatgatacagaggctgaagtagcctttttgctttttaagcttaaaaaaaaaaaaacaaagcactaaccaacttttgtcatacccaatggcattttattatgctctacagaaggatttcattcacagctgagaagaaaagttctcacttatcttttaaataagttataataacttttaaaaaaagcttaaaatgtaggaaggccatatgaaaccagacagctgagtctctaaatctgtcttaaaacaactgtactacatgcaaacaatagaggccaggcatgctcccgttatcttgctgaatataaaattctatgctgacaccatccttgattcaattctgtgctcttttcagtaagaattatcccctttatccttaagattaatactaataacgctcagaagctactaacatttctcaggtgccttctatgcaatcaccatctcatataaacttcaaataaccccatcaatttgggattattctcgcaaactagtttcagaaattttaagcagcctctacaacgtcagagctccaattccagtgatggtcctagaattcaaacccagatcttctgaaggtccagtggcctttcctctctatccaaacacctcgccatgcttccagcagagataatgtttcagtctacttgtataagctctttgacaacttatactacttaagtattttttaaaaaagaagaaatggaggttaaaataaattatatttccatttggacgttttacattgtactgaaatattttttaagtaagacagtccaaaatgctttaacaatgactgtattagtatgtatttgtagatcgagtttgttaagtccagatccccagcaggtaggcttgtattctcagaaacgcaactgggattgagcttcttaagctaccttcatcccctatttcaactgttaattacctcctagatttatgaccttgtgtgagtgattgggcccaaatcaaagtatgtgaaacaagtgcactgaccaaacagagtgaaataatgagaatttcatctacccaggtggggaagcccttttctgcagatgttcttttctgtttcttctgcaatgacgatgactatctttgaaatcaacaattatcaatgagaagcactctggtagaaaattgaaacagaaaatgtgaagaaggctcccatcttcctagaacagcatgtgactttctgccataagagctcattattaagagggactagttcacacacctaaccttccaaggaccacagctttattaaaggcacaccaaatgagccaggtggtttggttcatgtactaacgatgaattagcccatacctcagtaccaagtaaataaggttgctaacttggagaagtcattctggctggagagaataaatatgagcaggacataaaaagagaagtgtttatctgtgtggtcagggagaaattagggttggagtggacacacttattatctatctgttttccatcaaaactattttttaaaatgccacttgatcattaatcaacagatgccattctttgtagagctatgtaaatcactttagactctatagaatagattcagaaggtctgtttggtttgataccttcaaatagccacactttgttcttttaaggtaatctcatcactgagaggcttaacgtgtttcagagatattacctgtccattctagaaacagctagaaaaacagaagcagaaagatgtcacccagggtcaggaacagaggaagaaatagaacctatggattccactaatttacagtctgaattttagaataatgcaaggtagccagagggaaaatggaggtctatttaaaaatacattctgaataaaggagaaaactgctcaatgtacatgtgaaattttgttttttttcactgttatatatgtggtgcctggaataacacttggcatattcaagaaactccacaaatatttgttgaatgaataagtaaaaacgcgagaataaaaatggcccatcttctcaatcaggtctataacttgaagcctaacagcaggcttatcgatgaaatttaatcatttttttccaaaagccagactttgctagctatctatacaagtataaaggaatgtggtttgccctctcacagatgaaatgtgacaaggcacttgactagaacaatgacacatcaatatctacaagtacctcaattttagtttagatttattgttgttgttttttgtgggtgggaagggaaagaaggatgcattttaatgcactttctaccgtagtctctatttattttgcctctgtctttctcattgctctatgctgctcaatttaatcagtttgccctttcacaaaatgtactagtcactgccttcttttaggtgtaaagagtgtttcatattttatttttaagtaagtaaaaggagagagggaaggagggagggaggcagggagggagggagaaggaaggaagcggaaggggaaggagaaggggataaatagcaacattgagttgaccaataggacaacagcaaaaccagcacctaacaaattccaaagcaatattaaaaaagaaagccaatgaagctttatgttcaaaagcattctgtttagttttattttcctaccaaaatgtcaaaaaaaaaaaaaaagtcaaggcactaaaggtttaatattatacctggcttcatttactctcaccagaaggaaaaaactatgaaaacatgtctaaggagtactttgctatcccaaaacttttaaaaaactttaaaaatctcaatattctattaaaatagaaagacaatatatattagcaattttagtggtttctgagcaccgggcttgtatccatgaagactttttgtaccgatataaatgacacaactgactgtgattccatttacctatagggagcattggacaaagtgccttctactcaattttaggatctaaaaaccaagagagtaaggtgcaggaatttcattgcccttcaaaaatgcagaatataaaaattagactattatttaaagaaacatagcaataatggaagaacaagctactcaagaaaccagggttctctatgttcccagaaggcaggaaaagactgagcgaagtggaacccagctgtttgacatttcacttccaaccagcaactaaccctgaatgttgaatttggaaggcggtgtgttatggaggtccagtcactcataggaggagttctgcttggcaaaaatattagaaccaccccatgatgaatgaaaagctaacttcagtaattaaaatgataagcctagtaaaatgttgaactgactttaaaaaaatacattagcagaaccagaagagaatactataaaaatttatgtttaatatttatcagcttctacaggaaagtcactaaacatatgtgactacatgataaatgttagaaaagctgcaatagaataaaaaggtagaatactctggacacacatggaactgaaaatctcccttaggcattggtttcctactacttgcatgcccacagcactttacattaaaaaagaagtcatatgaatctctcttgataatgaaaggtttgttctagacttgttaatcatacctgtattcttctaccctggtaactgcagggtactagaagccatgttccactaaaaggccctaactttccagcccaaagacagctcattcacaggttacctacaagtgatctatggccaggtggctttctatttcccaatcttcttgaggttattctaatattttgcccaacaaagctctttcttcaaaatgcaatgccttccaaattaggcattcagatgactgattggaaattgaatgccaagaaagtcagccttcaggaggataaggttaaccagtcaatttccctcttagatgaacttaaagtagtaaatatggagtatgcaagagaaagtgagtttgacaaaggcatggtaaaaagtcatgaggtagagcacgaaccgtgggcaggccaaggtgtggaggaggcagaattataatgcagagacactatgagtagtatgcagaagttacaaggtagacagagatacacagaagatggtaaatcagatgatgcttggaagtaaagcttgtagtggaaagaagttgacatgagaaagaggtaatactatgttcaggatggcaaaggagaaggtgaatccataaatggcagctgctgaattcccagttccagattcagagaaacctaaccatactcaagagtcctacacctggattttcatgaagttctagcatcctcaatttcttttaatacatctccaattattaagctggaatttgtcttgtaaaagaaaataatttaacaactttaagaaactgcacatttctttggcctactttgcctgcctactttttaaattgtacagtgtcttagagtttttaaaaatctctaggtaaaacaaagccatagctaatgtctaatctactgactgtaatgaacttcttcagctttgtgattatcactaaaggaaacctgttcagtacactttggaagataaacccaagatgaaaataactgtctcttagagtaaaaagaattgataacaaatgactttcaaatctctttatattcctgaatgacaaatttaaaatttttgacatgttgaaaacctagtaatataataaaccaaggatgctcttcaagttgaataaatacatacagaacaacataatatcaacatgaaaaatgctagtgcagcctcactgacagtcaggaactcccaacatcttcccaagtgaggacctacttctacccaactgctacaatattttattacaaatgcaagtgttcatttgcatctctcctcaggactagagtggggattcaaaactctggagccacattcacacagtaggctttgaataggagcttggaatgaatccaaggtgaaagaaaaattctagtaacccggtaagagaatttgtaaacattcttaatggattaattagtttatttgtttccctggaagatgtccttcaggaagcaagttcacaaatcaagatacagtctgtgcagctggagtagaaaatcagggtcagattcccagggctgagaggtaaatctgaagtgcacttgaacattagcgataagaggcacattctgaagccacctcaaaaatgccaaagcagctatgaaaagtaaaaatttcagtcacatcagttctttgacatcacaccaatgatttgtgggtttcagtgcattaggtgttctgtaaataagaaaactcccagaactagatctgctcagtgaatggttaaaaatgaagatctcataaacagctctgcatcacagcagacagctaatagtaagtattcagggaatgctggctgtcgcacgttagcagtgctttccagcacatgataaaagtcagactctgaaggtagacagatgtgaatttaagttctcactttgagcgagttactttaacttctttaagcttcaatttctcatctgtgaaagtattaatagataaaaaccaaccacccctttggttgttcacaataactgaagaagataagacatgtgaaaatctcacattttgaaagcctggctctcaaaaaggctacttactgccagagaagaaggaaaaggaggaggcaggggcggaggaagaaggaagatgaaggagaagcagcagcagtgtcaccattattattactgggttttttaacagacaaaactcagaatcagtctcagagatactaatgattttttatctttcactgttaggcaattactggcacaagctttcattcttggcattgtagatcacataagtctttgttttggggggttgccctgtgcatggtgggatatttggcagcatctctgacctctatccactagatgccagtagcacccccaaattataataaccaaaaatgactccagatattgccaaaatatcccatggaagcaaaatctcccctggttgagaatcattggttgctaccaatgacagggagtctgtggcttagaaaatgttgaaaatcgcctgagaagcaacccagacaagtcaagggacaatgctggtgtctgactgtcactaaccgagtctcacattcttattcaatgtacggcatggaattttaaaacaagtacttgtcaggaaaccacacagcagcaagctcagaattcctgaacttacaaaataacccatggaaacagtgtggtggaaatacaataaagcacaaatgacacagagaggaacaatttggcaagtgctccctaatcaccctcactcaatgacctagtcatagcatgagcaatgtcctttcttctctcctgcatgagggaagtgtggtcagaggaaagactggatgccaaaatcgcctgtgttttcattccgctggcaaccctggcttcaggcaaggcttgacgtctctcttccagtttttccaattgtaaaacggagttggtagtaatgaacctaacctaaccagtgttttattctaagctgagaatatctattcagcacagggccttgggttataataactattgggagaaaaatcactacaaccacaggaaatacttttgtttccaacctttcggggtgaaaaatggaatttatttcctctttttcatgaaatgctttggtttggtttgccttacaaggtctctcctctgtgctatctacacacagactagaaacattatgtagattagtatttctcaacttgtgtttcactactgatcccctcagaaggtttttggggcatttttgtctaatcatggcccctctttatgaaattttaataccagagagatattatctctttatgtaccaagttcccttggagggccacaaaccactgtgaatctaagatatttatgctccccaggaaccaattctcaccaccctggggcaatgctggtccaactgtggattcatgatgtgacaggatctagcttacgaagtgtgttcagatcctgaagaactagcttccaaaagcaggagcttaaatcggggtttctgaagagactgagaatactaaagagaaacctggataaaccagataattcaatatgacatcaaagctacacaacacctggagaaatccaaattcccaaggaagaaccgtctcattctcccagggctggtgagtctctggggctgacaatgtccctcaatggttcaggcccagcgtggtctcagctataatcttgcttcatctctgaagagaaatgccatcaaacatgcacttaagcatgcaaaaaattttgttgggattataaaattataataaattaatataaaaataaatggcatgtaatagctaccatcaaagaaattggagccatggggcaaaggcacttgtggctttgatgaggtggtcaggtgacctgacaggagagatgcctcaagaaatcacatgacagctatatatgcatgtacactcagaggaggggagacagggaccagggcagcaggacagtaagtgtgtgccctgcagaaaggacattggctccagccacataaaactctgagcttggatcacatcttctgactttctagattttatgtgatatcttctaatttttaaatgtggacttgaggggccgataggggggtaaaaggtgggaggagggggagggtccgaaaaaataactaatgggtactaggcttaatgcctgggtgatgaaatatctgtacaacaggcccccatgatacaagtttacctatgtaatgaacctgtacatgtacccctgaacttaaaagttaaaaaacaagggcttaaaatgtctaaaccttttgtgggcttaacagaaacacatctgcagacaataaaaaactatccatttgtcaactccatttgcacacaaacagcaagaaaaagttcctctcttcttaagaagagaggctgtgactccaagggacttctcaatatcacagaaagcaccaaatggagaaggagtgatgcaaagctccctctttttattccagtacatctatgtaccctaatacaacagattaatctggtgggtaattatgcacagaaatcactgcctcatatctttaccatatatgaaaaatttggaaatagtgtaccctaattacctaaagaaatttaaatggcatgcttccatgaccacaagtgaagaggacttacgtgttttttaatatgctgcatatataagctcttaataatcactgattttacccatagttaacaatttaataatggcacatttcctatctaattagacaaaaatgtaacatcaccaaactaatattaccctacatatgaatttttaagatttctaaaacaggtaattaactgtatcttgctaaaaatttagttgatatgaaaggcccaagtgaattccaaccccgagtccttggcttttggacaattacagacctttttatagtagcttggtatgtttttaaatacagccctccccaagtcacagaggctgtgccaaatttagtctcaggagttctgctgtctagtgtcagttatttttcttcacttttcatattatgactgtaataaacaatccacagctttgtattttgctgacagacataaattcaacgttgcaaagcagtgtcactcagatataggcataacgttaaagaaatgtgacgtgctgatgagtttcacagtagttatgggctcaaggtcaacagctgaggcaaattcactttagagaaaattacctaatttgtaaactctttagctaaggtctgagtgatggaaataaacttttataaaataagtgcatttctcttagtgatatcagaagttaatgttgatagccacaagatgcttaaaactgaaaagaaaaattacagattcatgcttagccattaaatattgtcagcatactctagttctgacatactaatagaaaagataataaaactcataaatcaattggctgtctgcttctaagatttactgtactcaaactggccaactataagacaaaatattatgttgaatatatttttagctacctaaatacagggcccaacgagatgataattaatggacaaaaaacagacaggcatggtataagagctgccatccagatgaagggaggccctcaattataacaaacaatgcattttattacatttatctcaaatttctctaagtttccaactttatcaccatcttatgattaaaataagctgtgattaatatgtggaataaattgctttttccttgctgttttatttctacttcatttgtactgaactaagataggccctgaataaaaattccatgaaaagtcagtggttccctgaagcaagtccttggccttgtgttggttcaagatagaagtctaatccagttcacatcaaaatgagaaaaaaaaaagcagtggagatgccgggggagtgatagattttcatatggctgaactgtagcatttacatgatcttttgtctgaggctatccatttcattaatctgtctgatatcaaagagtatgttatgaaatgatattgacaataaataggagcttccctaaaacttttcaaataaatttattttctaaaataaaaggttggaaagcctacattgggcccctctttaattttaatttcaattaaatctccaagtctgaaagccactgctctgtgtggctgagtacacgggtttaattatctaaaagaaggtgccctggtggtggatgagacttcggtcagaaaagcaccaagaagggaaaggggaggatgggtcctgaagggtgagtatgtgctgtgtaccctcatcacccccatccccaactctgggatcactgtggatattgcaagagactgcctctacaaattcataagcctaattgccaaactattaagtttgggcaattcactctgcgactttggccctggaaactgaccaatgataacacaaaagcatagcacaaaagcactggcagagataatgatatttagatgaaaagtgacataaagatgtgttaacttctggcttctctcccaaacatgtgaggggggagggaagggaaaggagacagaaacctcaggttggggtgtttcactgcatccctcaccactcctctctatttttatcaagaaactgtgcctcactctccctttatattctcctcttccattctgcacacacatgtgcacatatgcactcctgcctcaactttctttttcttactccaggagattcagagacaggccaaagggtcctctttggtggcagctgaaattgagagtattgggcagcaggcccatcttataacctaccaaaacaatttgtgggccaaactctagggggtctaacgttggaaacctcaactaatatttcttcttaaaagcaattaattttagactatggaaagtgtcagtagttaaactcaattactatggcaaagcaatattatttctctcaatgagagcaaaaactaagccaacaaaacacgcaatccaaaggaaggcagatttctaaatgagatgtaaccaaagacagcaaaaactcatcttaaaattctaagaatctgtcacaatctgtctctcaaggttcagctgagttcaatggtattccctaggtcatgtggctatttcttttcctcagtctaatcaaacattctttgagggattttggatgcaaaactacttcacaggttttttatagaaaatgaactgatggaaaccatgttttccgatcgagagatttaattctccgtgagcgctctggctttacaatcccacaagtaaaatgatctcaggaaagcagctgtctttggcattcaacttctcagtcatttttctttgtgtgtgcatacacacacacacacgcacgcacatgcacacacacacacatacacatacacacagtacccactgtgacgacagcgtcttctgtacttggggacctggcatgagacaccctctgacagaagttggtgtggtgtgtgccacttggaccctcagcagctactgctggcacacagagccctgatcaggtggggtacggcggtcggggacactgacctgcaccggctcagggggaagctggaccacgtgttgcatgcgttcgctgtggtgatgccttgactcctcctcatagatgacatccctctcatgctggggaaggttcaggaagcgacggatggtacagaggttttcccagagggtgcggttttctgggcttgggttctccttccagcggagcagttcacacagccagccctgtagagagaggaggtcgcttgcattaacctgcagagtgtagaggagctgagggggccttgactgcggtccagtgccatcacagtacatctttttctgtcaaaattgttcctgccaacgtggggagatagtgaaacagtctgactctaaaaaccaacccctgaccacataggtggttataccaatgcccaagaatctttcctcttgttagatatcgtatcaccctgcctatagaatatattctcaattgcagtttctctgtaaaagattagcaagattatagtcatctgttctcagaaaaagtaatttgtgtcagtcagctacaattttttaaaattacccaactgggcagcatttcatgctaagagtgaagataaacaaatatgcataacaggacagcaaattctaaaaaagaaaaattgtctaggtgtaaacaacactgaattctctagggaggaaatattcttaaaattatcaataactccacaaaatagaagcaacaaccttggctagaatgaaaagaaatgtatatttgctcaatctctgaatacctcgggctctaggccctcttaaccatcaccttcccgcaacagccacacctgcaggaaggtaggcagttggtcaggtcacacctgcaaatgtctgcttccaaaatctggcatccggatgttctctctcttgcaactgcatgagaaagaaaatgtaatgcaaataatgatggattatatgaaaataatacagaggatgctgtcaacatcgctcactgactcatgtcaaaatattttaccagtagctttctaacccatcatttctaagctacatcactaattttaaaaacaagaactgtcccacatcatgtctcttgcaaaagagtaaaaaaatgttcttaagaggtgcataaacacgaatgactttgtgaaaaataattcccaaacctcaacaaattctatatcatcacttgtaagccaatgaaagttcctgacacgcattataaaaaccccatataatatcataagccattgtttgtctaactctccactgtgtcttctgcctttaccccaaaaaaggcaagatttgattatctctgctgcatcagccaagacagcaacaccagctgttctcattgtgcagcctcttcctcgcggcctccatgttaataacctgatcattccattttctccttcaactgccggctgcagcaccgcgaagagacaaaaacccaggcccatctgcagcagctgtaggcactgaactgtgaagccaccagggatttataaactaatctgtaacacaacactgccttgtttttacaagtgagaggccacatttgcgcagacctgatcttttcttgcaataaactggaagcttgggagagttagaaggttaggaagaatgaaaacaaggtatcttatcatttgcttggaaatctttttccaagtattttcatagattttttttcaactcaattgaaaggcaggtcatggttgattttcaaggtgcaatgtatataaaaaatgaagacaattttttttatccataccagaaaataaattatagttttaaaaatctagtccccaagtgtttcctcaagggtttctttgcataaagtaaaagaattcttgaaatggaaaataaaccatctgtggaaaaataagctcctacttctctatcttttcatagatctgaataagtctccaactgaattctttcaaatgtttcaaacaggtatgtttaacatctcccaggggaggcaagagcatggagactaaccatttaatggaaaatacaaacaaaaacctgcatctgttaaaagaagaagatctgagatacccagaccttaaggaagacagcacctgctgttctgcttgaggactgaactgcattgtgggaagccgcagcttgaaagaagacaggtgacagctgagtggtatctccacttatgacactgggaatgtctcgcacaacattcattgccgcatttgatttatatgcgctgttataatctgcactcattacaatcacttagaacaacactacaggcctcattatggactgtgtgctgtctgccatcagtctttaagaagtgtagtgctcaatttgcccactgacatgcaaggtcttgaccttgaagctattagggagcagattagacacaagtgtgatcatgtgtgcagacataagcaaaccaaattaatttctggcacagggaggtagccaacaagaccctgttcttaaggcaccagagaacttcctcaaatccctgatggagctgagctaatagcatgtttaagggaacccggttttgaagatgaagcacattcatggtatttagagggttattaatctagtttccccacaaagtgtttgcttggctgatcagattaagggatggagccttcaacagcgcacccccaccacagcaggccccaagaaatctgtgatacttcacagccttggacatattgcaccatgtgtacccagctgcctcagtaattagcttatgaatgtatcagctggttctgtgatttttataaataataacctacagagcagaaagattgtcaagagccttatagtagcacaaaatcggaaggtgatcctaactctaccttgctcttctcctaaaggccgttattccctcctacgggcgctcctgtgatgccatatataggtatttattttgtatctgaactggtaatgtatttttgtgttagttttcctcatggcagccatgatttaccttcccctcactctggctcgcttgctcattccatgtatttgtaagcctatcttcaggaaatctattcttccacctcacttcccatctcatgcaccatcattttattcatatcatcttttcaccagcccatttgggatgcttatctctgttttctcaatacggtctcttattagcttgtttgctggctaatgaatgtgtgagaaagtgccacgcagttgcatgaacacacatgtatgtaattgtgagtgaccccatcacagaagagataaagggtccccatattgggattttttttcatttatataatctttgcatgccatccaagaaagttttgcagtatcaggcaaaaaaaaaaaagtgtaaatgtcaaataaaacagtgacagatgacagtattctctattgaatagcactgtttctgtcgtgcatgttcaatgggaactcatgaattattaataaacaaatctcctttttctgttaaaaatctcaagtaggtttttgttgttttctctgtgttatgtggagcattccatgagaattattttcatttcagaaatgctgatacagaagttcatctggtttccagccttggacagctctgtgagtgggcaccatgaactgtggagtatatgcttccctgggatttctctcttagcctggttttaagttttgaccaaaggttggctgtatattcctagagtccatttagcttttacagtctggtaaaactaggactgagtgaattataactgtttgagcatagctaggaatgtagaaggtatcaaacctggatctctaagacctaactgctaagttcctggtctgtcattaaataacggggtgacctttgggcaaatagttacactgttcaagctcctgggtgcttaactgtaaaaggacgggttaacaaaagatggtctctaagttcctctttggttctacattccatgatctgttaccttgttatctgtcagaaaaagcagatagtgataaaccatcagggttaaaggcacaaataaaaaataaccttgacaaagtggtcaaggtcaaataactagtgatgatatactgacaccacgaatgctctgatataatgtactgcaaaggttacaacatcatgtctgaggtagtcttgcccaaaatgcataacctcagtcgaaacatgagaaaatatcaaacaaacccaaactgagaagtgttcaacaaaataaccaaaaatggcaaggtaatagaagaaaagaaaagacttaagaaccgtcacagactgcagaagactaaggagaataataataactaaatgcaatgtggttgccggctacgatcctgtcccagaaaatagacattagtagaaaaacaggtgaaattagaataaggtttttgtttagttaacagtatagaaacaatgtcactttcctggttttgataattgccctatcatcaataattgccatatggtgatataaggtgtcaacattaggggaagataggggagggatatataatacagtgcaatgatcccttccatactagtttggcaacatttttgtgagtctaaaattagttcaaaataaaaagttttttttagatacaggaaattcctggaacttatagagaaaaatatacatggagcctaagtgtaataataccaacaggttcgcaattaaaactttaccttcaaaatctgaatccagagaaggaatctattaataagttcaaagactgcttccttgcaatcaatggttaaaagttcccaagcattagggtgcataagcaaataatatttattcacatctcattttagccatctcatcagcctcttaaacaaatatatttccctcagtagaaaaaacaactctgactgcccttccaactatgcaggtgagatgacactcctaccagtcaagatatagtttgtttacaatccaagtgttcctgaaaagttgcatatcaatttacatttacaaagcaaatcacattgtaaatgtattagacatgcttactatttgaagaaatgtgccattaattctttctggaagatgaataaaaaattcctagtttatcttttattaagttgatagtttcattaatgagttgcataaaggagagaacctctagttcacaatttaagaacattactagaggcaacaataaaaaaacaccatttgcctccatttttctttcatgaccttgtctcccaccagttcccctactgaccttgtgctccagccactgtgaattactcacaggtacactctcaccttcatgcttctgccatgttactctcttagatggaatgtctcatactcaacttcttttccccatgagaagctgtacttcaaggctcagctgatgtggtctcatttgtttctcactcttgcataaccctgaagcattttgtttatactttttcacaacttgatcattattatttttaggggtgggtatgtctgcattcccatcagaacagttagcttcttgatgggagtggagggcaagggtttgtttcttactcattttaccattttcagagcagagtatggtttcttgcacatagtagcttctcaataaatagtcattagattgaaccaaaattattagagtacacagaaattagcctagaggaatgttttatggactcaaattcagaaagttattgtttgagagaagcaccaattctcagaagcaactttgtcactgttctaaggtttgtttccctatctctaatgcatgaatacgatagggaaaatggtccattatataaattgcaaatagtaatagtagtctctcaggacattgattctgttaacaattttctgttgagcacccatctcctgcatgccatgcaatgaatgggctagtacattacatatattatctaattgtcattgttactttttacttgaaaggttaattgagactgccaacaagaaagtgagtaattctgaccatgaagcagttcaggaaaagtgtcatcattgagattatggcatgcaaggtgaatcttggaagataaagatagatttcaccaggtggggagaggactgaaagtctagaaatgaaggtagggctcagattataaagaatgtcatgcaaaaaaacaatttttatcttaatcttatgggccctaggagtctttgagggctttttaactgacatgatgaagaattaactcgtctttcttttcatctctttcccccaccttcttcctttttaagaagaagttgttggggaaaaggctatcataaagtcaagagcatgacttatcctagactagatatcttttttcatagtgaacttgtgtggcttggtattaactgggacccacaatggcctggtactggtaaagtgcacacttcataagttctaccctctaggagtgttcattctaaaaagacatgacatatatcataaagaaccacactacatcaatcatttaaataatctgttatcattttaaccactttcttttctctctctgtgtgtatatatgcatgtatttctgtcgttgctgttgttaatattagagtttttaaagctctcttcaattgaaaatgaatgaggtatggcaatatctatttcacttataaaatattttaaaagattaaaatatttcaagtccacaataaatgagtgacatatcctccaaaccacataccaaaggctgagaatgttcaaatgaccagggaggcctttcacaaaacaataatatggcccagtgttcaagcttggagcctaacagataagagtttgaatcttggctgtaaatcttacatgttaagtgataaggaggggaggggcacaccacagatgaaaagagtggggttcctgtccatggtactgaaatgccactgcatacaaagtggcttgctttctcttccccaggacacttggttttgaccccaacttctcacagcccccatgttttttccttaaaaaacattggtctaggtttatgactaattttccagtttttacaatatttcagaacaaatacaaactagaacttgctcagcactaaacacaagttcatagcctgctctgatctcccacaagagttaataactttacccctgttgaataaagctgtatatgctccttgaaggcagggccttgtcacagtgattattccccttgatatgactaacacaaagctaatgagttacttcacctactaattagtaagtagcccccactccctttgcccctctaggaactctaatgaatgaatatctcagcaaatgaacagttcttcaggagaatgactcatagattcttgcagcagaaatgcaaaaggccatttactcacccacatcttcaatacagaaaatgtcagcatatgtaaccaaagggaaatgttttctgagtatctcaaaaggaaactcatattattaaccacagacagttcgctttctaaatggaagcacataaagtccccaaacaaacttttgtaactgtgaaaggatttctcttcagatggttgagactcttctgaagtgtgaaatgagccagataatattcagctcttgtttcttcgtcaccgaattctcttttcatgaatccaataagtgtctattaaaataaataaaccccctaatgactcaagataacctaatcaagaaaactgaaatggataaaagcctaactacaaggaaggcttgtcaagggcttcaatgaatccctgacaaggagattatctaaacctgaaaaaagatttgtgctggctatttggttaaagttcaaggttaattattttatactttaaatgtggtaagtacagaagatctgcttctttacttttcaaaattgtatactaaattctaaactgtatttttacagggaccaatttttagctatgtctgggttatcttatgcatgtcactgacatttctatggatatgtctgtaaagattgagtctgtaattgagagtaatgaaaattttatttcagaacagccctttaaacctctgctgggctcaagtcaagaggggattacacaaaattttgttgccctccttagcatacacggaatatgcatagctatttaacagtatggagatttggtacacctttacacatataaatacgtacaaacacacatacatgcatacatgggtacatgcaccttaaaaagccatttgtgtttgtcaaaaaagaagaatgaatctagaatcctggacttcttcacttcaacggcagaaagatattaacagcaaaatgcactaggctaaaatatcaaactgaaaacaatcaaaatgcttccagcacctcccttcaggtccaaatgccagcatacctgtgacgtatcactgtatattgcaaacttcctcaagaagttatcataatgggtgggtggcaggggtggggcggtatgggcagggtagtggttggggaaaccagacagggcagacaaccaggagtaaaactttttttaaagatcagggtgggactagaatgaggtgaacaagcaactagggcatgaaatgtaaacagaatggcttgacaagtgtgtgctttcttacatcttgcaccccaggcagctagcttgccttaccctaggtcttggccctgtgaaaagaagattaaatagtctcaacagcaaagtggtagcaaccattcatagataccaacattctcccactgtaagaaccacagtttaactcgatgtcctcttccctaaccagctggggagaaatcagagaggaagctttaatatggcaacctaatttacttcaaagacacatgcaagtttccaaagttaccaagtcaggaacaggcaaaataatgaactcaaaggtttctgcagaggataaaatgaacttaaaatgagtttaaaactagtgataagttaaaagtatttgacattttaagaactgcatatgtagtctgattaatcttcattatcatcattattattgattgtctaaggactcctataaagactaattttaaggcatgaaacattaacataattaattgtgagggtggtaaaaagaacccaattcttgatcatgaggttgatattaaaacagatcttatgggaatgtctgaggagattccttcactagaatctgatttcttgagattataccaagagaaaaaagaggggagactggagggctcaacttgacgctcgcgcatcatatcactatgttcacaccacttagtttggcatttgggaatctgagaaatttcttcactaggcatataatatttttcaaatggtatttttagcgtacatatattaaacttttttgaatttgaatttggaacaccacccctaaattttagtatatttcgcccagttgacaagagtggaaactggtccatgataggctctcagaatgattgtgttctgaagaaagctacctggcagctactcagtcaaggctgtacacctcattttttcctaccttacatgttgaatataaatggcaaaagcaaaatcattagcagtgaggcagaccaccaactcacttttacacagggtatcttatggcctatagtttctgttagtctttataccagagagctcaggtcagcaacatgtctacttccagggccctaagttatcccagccccagtaaaggcatcctcaaaatggaaacttaataatataagatcaacattaaagcactttttgtgcaaaatggcaaaactttgatctttgtgcaacattttttaaaggctaggaaactaagtaatgagacaagataattttttatattttgtaaatttactctcctacataaaaaagttgtcctaaaaaattatagttttaacttgtctcataattatgtgttacacagttacgatatcaattaggacataaacatacacatatactcccatgcaaacatatacacattgaaagaaaagattctaaaatattaatactaactatgtctgggtcatgaaatcatgggtgatccatgttttcactttcatattcttcgtcactttctgaattttttaaaatgaggctgttaaattacttacgtaatcacaaaatataaattatttctttaaaaaatgtataaatatgtacctgagacattttaagaagagatgcaaaaacaaaaattaattactctctttcctttatttttcttttatataaaaagaatcttccacagagacctagatgttttaaattatttagcctgtcaagcaaattagaccacctataaggagagattttaagaaaaaagcaatgttcataaaatctgagcttgtaaactacatctaaaacataagtacactctcacttaggaatacaatttgttaagtagttgagaacttgaaactttttttttttttttgtagaaacatagtgctaaggcataaaggtcagtacacaaaatccacttaatcctaatgtacatgaagcatagaacatactgaaacccaatcaccatgtaggtcatagtttctatggggaaaatgattttagaattgtgtattacaagccagaaatccatctcttttagctacaatgggatcacaattatgcctcccattctaaagtgtgtagtaggaagaaaaactctctcattcctgactttagtggcagttcctgcagccagtgggcctgcaagggcataggtagcatggaggattggcagaggtctttaaacctttgtaaagatgaggacatcttactaatatcatctcaccagagacccccctggttccctgttggttccaaaatcaccctttttcttttatcccagcaggctctggcactaccccctttcattatcaccatctggggtttaaaaccaggccgtctttttccccttgtctgtatggaacagaacagggtgtatcagtttctctccaccttcctgatacaaaaagcaagtccacagcccttcggaagtttttgttcattggtttatctttttaatggagggaagggaaaacagagattaaaaataagcccctttccatttctctccctactctatttttacccaaacctagtaggaaaaaacaatcacatatgtagtgttgagtcttcgggtatacaaataataataataaataataaagattaactctcctctcaaagaaaaaaaaaaagtcagatgatccttagcattctatgagctaacctatcgtagcccataaaagggagaagatagcaggatatgagaagaaaaaaacaatcagtgtctgggaaatggggtaattgatgtcaagggagagaaatgtggctgaggatgttgtcaaagtacacaaccgtcccctgagagccgcagaagatgtgcccacaggttactatgttttctctcctctagatttctacaacccagatcacgggtgattgggtaaaattgggaagaaagggggaaagcggccctacagaatctgcagaagagggccagcaagattagcagaagcttttgaggaacaaggcattcctgtggccacgcagacagaatgtggggcattcgctccctggtggccctttgtatgtgagggtcagactggagttacacagaaaacgctccatatgcctttacattatggcttctactaagaacccctaactcctaattcacagagaattaccactgtcattctattccatgatctgagtattctgcagacagaaaaggaaggtaatcctcagaattcacacacagaaaattattttaaaacactaaactggtcctaaatagaaaatgaaggaaaagtacaaggcgaaatgtgtataaacatgtctttccctctggtcttatccttcttggactcctttcccacgaagaaaggggcaagggcctgatagaagatacctaatggaagtggatgatggactggcctagcaatcaccaagggactaactagagctgagctgcaggaggtggtctgggaccctacaaatgcatcctcatgtaacccatacactagggaaacatatacacacacttcccagtaatggattttcacaatgaaccagtttgccaccctttcaactccttttctgaacccctatccttgcattgtgcctggttcctacttaaacacttacagccctcgaggaccctcttggaccaccattcctactctctctaaaactttcctccctcttcctattccccattcaaggcttccctaacacacagggcagtgttagaaattattgttaacagctgattacagcaattaacaccaaggagtgttaatggaggggtcatataaatttcaaatggaaggagaaggttgctatgcatatttgaactcggccttcagggattcaaggcaactccagttcacaagactacttaattgtttccctaatttcaccttcaggagaagggaaagcccttgcatttggctcttcagtcactgcaagaacttaagatccctccaaagaaaaataaaaggagggaagaaaatgcaagggaagagaaaaatctttgttcctctccgtcctcacaatacaatggagtgggtgtggccactcccctctgcagcttgaaaaggttaagtcctatgattagtcatgactaagagagatatataagtctataaggtgtatatatatgactaagatatatatatccataaggtgtatgtatgtgtatgcatatgtatagacatatatatacacgtctatgtatagacatatatgtatgtacatatgtctatgtatagatatatatgtatgtctatacatagacatatatatgtctatatacacacacagatacaccttatggatatatatatatctcagtctcatatatacaccttatagatttatatatgtatacacatacatgtatatatgtgtatatacacatacatgtatatacacacatatacatatatacatatatgtgtatatatatacacacatacacacacatgtacacacaggtacacacacatagatacaccttatggatagccaccaaatatatatgccatgtaccaaatcatgcaattgatttcactaaatgtactttttatcaaatgaatactgatacttataaaatggagtgaatatcttttgttaaattgcctttgaaactgccaattaaattcattttgtttggcagtatcatttttaaaaaaaaaacataataaacatagtgcctgaattgcctatctagtcagctatttacaataaggttccccactcatagatgaaaatgagatcattgtcccagtgaaaaaggaacaacctcaaagcatcttatcctcacttaagctcaatcttaccttcagcatattaattcccagaactatgttcttctccaaattctacgaaatcagggctactgatttcttcaggagacatcaaaaatttggagagctaagcttctgccagttggcaaaagcagctttcaatcagctacctgaattattttaggaggctggaggcatcactatttccaaaagccatactgctaaatcaacaggaagattacaggcttttggaatcaagttctcagactgtggtcttcagtttttcttgaaagctgcttataaaagaaggactgtgtgaaactttgatatttacatcaagtcacaactaaggggcaggtttgcaaaatcaattgtgcagcttttatactcactgcacatttaccacatatgtcctttattacacagtggaaaaccattaaatgcacagtagttttgccaagtggcattatgcatttaacagctttattcgtttaacagctccaactctcattatattttgccatgtggtacatgggattttatgcatttaacagtttaagaaggctctatggtattttcttttcatgtatttcatactatggttggacattatgtcttagcaaactgtatttcactgatttcattgaagagagaaagtcagagtaatctggaaaacttactacactgaaattgaaaagggaaacaaacatttcaatccctttccaagttccttgatattctactcccctccttttatcaacatctaaaaataacctatatcaggttaaaactgcaggtaaagaaggctaaccctgtactctataattaatctaaatataacatttaactacagtttgaagtttttcagttttaaaaatttaatttttattgaaaaccttcttgcttaatagaaatacaatactcagtcacttcctttctttatagcacacaacagaagatttgttagggagatgatcaaccatttgattatttacatatgtagggatgaaaacatttgtcatataaggacacagaggaaatcaagctcagaatcaaaggactctcaaaattatgctttaactaacttttatttcctccactctgcattaggtgttcgccctaggtatacataagtgagcatgcacctcaaacctaggattctaggtttgggcagaagttgtccctttaaatgaagaattgaagcagatagtagatcccatcaactgttgctgctttcagaaataaaaaacctaagcatctgtctgctcttttccccagagcattacattctccacaatcccagaactctgaaaaattttactggataagcttctgtgtttttctgttaaaagattttagcacttactctgcactccccccacgtgtgttttctcctgaaaaaatcaactgtattctgtacataaaagaaacacctgacatcaaaaggtgtctctggggctggggaaaagtggttattataacagagttggacattccccttgtgggaacaggaaaggtgatgagacttggctaaaacttggtctcagaaaggtgctgttatatacattctaagttttgttcatacacacacacacacacacacacacacacacacatatataaagggagagaaacaaaagggtacattgcagtgtttagaataaggagagaaatcattcgaggctaattttttttaatctttaaaagaaaaaaggtcaagttttggcttcatctctattttgaactccaatgggaataaaagcaaactagagtaaaaggcagaacatgacaggtttcttgggggttattactgttattattattataggaacagatgtatttttattggtggaggaaggagaaggatctaattccagccctcgattttgcttttttaaaaaccactcacctgacttttatttgcagccactttggcaaacagggcttgagacaccttggcccttttcatctcctgttggatctcgtcataaatggcagctgtgatgttgatgttggcgccgtccaccttaatagggaggtctgttgtcggtgtcgaggttttggcctaccaagagaccatgaaaataataatttaaaaagtgctgcattcagcccagccatctgtgcagaaattatcaaaggatttcagtcagctgatgccaaactgcattagctacagagggacacttcctgtccattattctaatcaggttaattgtgattggaaataattgcagtgcattcctataggacatgcagaatcctgtcaaccctgttctctcacagcatcccagacgaaggttcacaggtaggatggctctcctagacaccaaactataagcaaccatctaactacaaaacaaacatgcagaacacacacacagttaaccttttctttctaaaaatggcacaccttggaataagagccaattcttccagaaaaaaaataagtaaatgggtagaggtctctaaataataaattattactcaatttaatgcactcccaagtctctcttattctttattaaagctttacatatgtcattcgagtatgtatggtttcccatcattatcatcattatgctacccagacagtcacctaatttcacctaggaaatcagtggaaatgaaacaaaatttcatttcataaaactaggcttcacaatgcctttgatgtgccgttttcattttcttaaactcatattgcggttttatgtattctgcagtgctcgttttaattgaatgatttcccatcagcttcagagacaaatgaaggacaatatagaagtctgtacttcttggggttaggataaccctaaaatgtctgaatctacttaatccaaaagacggtcataacatttacttggtgtgagccctagaatgcattgctggtgtctaataagagagggctgagacattttcttagaacctctggcagcaagatttcaggaaaagacatccttgatccttgtgcactaccagccgaattggcctaacctgggttttttctctttgtccccattcaccctagaatctcaaaccaacagagttatctccaaatcacaagtttccctgtgcggatgccctgagctgttctctactggatccagcagtatgcaggtccagagaaagatgtaacaggcagtgtggactctgtgacaaatggtgtctagcggcagaacttaaggccctacgtttccataaaggctttgcttcctaacagtgctcagtaacttctgccatttttcttctacctccttctctcatactattttctaattaccgcaaagcaataattactataatttatggcgtgctttttatgggccaggtactccagaaagcattttaacatttgttttcacatttaattcttttaagattccaatgagttagatattattattttcatcttacagatgaagaaactgaaataaaagaggatcttaacctaggacacccagcagccagtgaaggaaccatgatctgaacgcaagtctttcaggctcaaaaacatgggctcaggacactgcactacacactgcctccaaaatctccaatttatgccaggtgctgttgtaagaattttcttgctatgttgggactttcccattaaaaattcaattatctgtaattttttaaaataaactatttgttctgctcaaaatttctagttaacccacagtgctttccctgttaagagaacgttttagcatagcatgtctgccctttctcaattcagttttcttaatttgcctcactgactatctcatcctacctgattggtcaagccttctctccaaccatgagggctaagacgaaacccctcagccatgtgcccttacacaagttactgaatccatctaaacctcagttccctcatctgtaaaatgggcataataccataaaatggtgacaactgaattcatgcaaaatgttcacaacacctaatacacagtaagcgttttaacaaatgatcattcttatcttagtattgttttgtcattattaagtacaccatggaatgctggccagctgaagaaataaaaagagactggaggtataatttcaaatttcaaatttcttcaatttgtttttcagctactaataaagtatagatggggtctggaaaataatctccctgcatcaatgtcaagctgcttgtgtgcactaaattgctgactccaactaaaaggctgagtcagtgagtactcctctaatacttgttctcacaataaaatctgtactgtactacgatctttactgttgagatatgactgtaaagaattttaagtcagtaatcatgaaatgttttaaaagactttaataaactctcctttctcaatctttacccaagagaaaaagacaattctagagaatgtacaaatgcaatgccatgaccgtattctcaaaaacatgtttaaatatttattttcaaaaatatcaaaactgtgatattaaataagagatttccctgctacacctatccctaaagggcatctgtatgaattttctagatggcattctggtcaaaataagcaaaatactgaccctaactgtggggccttgtaagtcagtctggcactgaaagctattaggtctttgaaaaggtgcctacgatatataatcttgttaggaaaatagtacaaaagagctgaaaacaaatacacagacctgtgttaatttctaacaagcagaagtaactttctaagaagagctgccttgtcaaatggccatgaagtatgcctgggctcttctataatggtttaatgggcttcaaaagtggcaaaaatattgatgaatttagcagaagtaaatattagtgcacattaacaacttgcccaacttactagctcagtatgtatgtccccagatttttttttaagtaaacaaaaatgcttggttatactcatccaaagtaagcagtcaagagacttatttttggttcaaacagtaactaaaactcataattcactaaagactgaagtgtaagtaacacaatttggcagtgcatgatagaaagtaatcttcaattaaaagtttattgcagagtacaaaaatataaaaagagttaaaatgtgtgaaaaaatggatatacttgaaaaagctcaaatatttctactaggatacaattctgcttctatgcttaatcagttccttagaatttatcagaaaacgcaaaaccaaagctataatatctaagcaaaacaacctttggttttgaaccgcccatttttcagctttgtataaatgtatatccattaggtcgggcacggtggctcatgcctgtaatcccagcactttgcaaggccgaggtgggcagattacttgaggtcaggagttcgagaccagcatggacaacatggtgaaacccaacctctactaaaaatacaaaaaattaccctggtgtggtggcatgtgcctgtaatcccagctactcgggaggccgaggcaggagaatcacttgaacctgagaagcagaggctgcagtaagccatgatcacaccactgcactccagcctgggcaacaaagtgagactccttctcaaaaacaaacaaaaaaaatttatacctgttaaatactggttttgagaattagcactcagacagaacctgcaactatcatagcaacagtgaacggactggccttatcataaatctatcgagtagtaaaagtttaggggaaataggggataggccagaaatgagtgggcttggatgtgaactagaaatgacccctgactgccttgagaccttgacccttgagttaggagctttgaagcacacattactagatgtatacatttgcatgagggcctaagaaaagaatacttttcaagtgtgtggagaggaagaatggaagtcaccaaattctgtggggagatcatcctaggatggaaaataattaaggcctacctttccaccatcattttctaaaggatcattgagtgacatctcagtcattctgatctggacactgcatatgcatgcttccactgcaagtgttcctccattttgtctttttcagattacataaaacagagcttcaactaccctctgccccctgccctcagccacctctaccccatccagcccaaccaaataaacatacaatttgagggaaagcagtgtgcttgctatgcaaactcagcttcaacacaaatgccctaactcctaactgagcagctatgtataaacatcctagagcccgcccctgtgcccactcctaccttcctacccctcacctaccacgtatggaagaatgggacttcctaaagggacagaaatatagtatgggatcatatatggtcagaagttcatatcctctgaccaacatgttcagcggattaagaaatcatagaattggccatggacggtggctcacgcctgtaatcccagcactttgggagaccaaggcaagcggatcacctgaggtcaggagttcgagaagagcctggccaacatggtgaaaccccatccctacaaaaaatacaaaaattagcagggcatggtggttggtgcctctaatgccagctacttgggaggctgagacaggagaattccttgaacccaggaggcggaggctgcagtgagccgagatcatgctactgcactccagcctgtgtgacaaagcaagactccatctcaaaaaaattaaaataaaataaaataaaataagaaaagaaaaaaaggaaagaaatccttgaattatgtctctcaatgtttgagggaaaacacagtaactagtgaaggcaagatgtttccaagacaaagagtgaaaaatacggaaagcaagtttctcacctgaggggttcgggaggagctgggactgctggaggccgaggagaccatgctcacattgggattcatgctccgctccctctcatcctggtagatgcgatctcgctccacttctggcagattgaggaaattctgcatggccctcaggtttactagaagagactgagaggctgtccgagggtcttcttccttacgcagaatctcagacaacaatccctgattaaatgggggaaaaaaacagaccaagtcacatttgcaggtatatgtgtgtggtttctgtcttccacccctctcctcctttgtttggtttaaccagctcgctgtgatgtcaagaacctcacactaattccttagggttctccgatatgaagtcaatgtgcttgccttccgggggatatgcattattttaggactgttctattctgacactttatcatcactgtaataatcatcagtgtacagacatgccagctagcaaggtaggcacttgggaagaattgtgaaactgcaattaccaccaggtgcctcctacaagtatttcaggaactgttagaactctctctgcttgaaactgggaacacttggcagtcctgcttagctttacaaatctgccaagtttggtaaatttagtttcgacatttaaacagcatggtagatttacatcaatttaaaaaaaaaactggctgaatttctgtatgaccggccactgttttcaatagagatatttcttatgcaaaaaaaaaaaaaaaaagacgcaaagcaaatggctaaattgtgttaaccctctgataatttcccaatctatacacacaatagttatccttacatatgtacaaagggcacccaaatctttcatgagacgtcttcatgggggaaaccctaatgtcaccattaaagcaatgaaaatgaagtcacctctggcgaggggctgagcacactgtaataacagtgtgcacggaatgccatgataggcccagatactttctgaatgtgtgactcacccaaatagaaagatttaaataggaagtcagggttttcatgtgctctgacgacagagaattcacaaagaaaaggaaaatgctgccaagtctagagaaaagtagtatggactccagaaaagggctggagatctaaggtgggacattgtcgtactgggggtaggtgcaggtctatttccattctgcacacttgttggattatcacacagagacatcactttatattcccagctaatatattgcttctcagagcagtataagaacagggtttaggattatcctcctgggaagacctgagatgttaatcccatatcttagaacagatggggcaactgaaatcatgaaaagtcacttctttaactgtagtaaagtagaacagatgccaaagacatttccactcaggtgaaaattaatgcaaaggaaacactatcagatttctaatatgtggcttaaatatgaaaaggcaatggatgtaagaggaatatgctatctctagttgtccaaaaatcttcagggaaaggtaggcaatgttttaaaataaagcaatgcattataatatagcgaagcaaatgccagttataggaactgtatcacatagcactccaaggaagcaatcaccactcagaacatcacatagtcaattttactacaagaaacttacaagtactatgtcatctgacagtttcacaatttggatgtcatgttactttgattagagaaattctaagtaatacttggtagaaaagctacagatcagtgtcttttgtgtgcgtctgtgtctgtgtgtgtgcatgcatgcatgcccaagaaggggacaaggtaggatgtgtatgtaaaaataaccgactggtacatgattcttaaaacaatccagatttcttgtcatgcttttagaagcaacgagtgagacacttatcttccagaaaatgtgatacaatctaagtatcgactctctgaaattaaaagtcagttctgcctaaagctatcctactttccacttgcactaagcaacctgaaatattcataatgaatttgttttgaagataaaaatcttcaaatgaatatgcagagaagcaagagcaaagtggatttcaactttcaataccagtaaaaaacactaaggttgatattttttgagttttctttaatgataaattctgcatataaaggatgagttggtctttttcctctccctccttcctctccctttcactctcataaatttggtatttcaataaatttcaaattactaaaacttgaaggagttttagggtcaacacggataaatttgtttagttattatgattatactcaagagatctcaaaggcaaagtttataaacctattcttcctctgtgaaattattttaacaagttgtggagtttattatgggaaagattttggatacgaaatagtgacataacaaaactattgttctaatggaccatggctcaaaattatgtttgttcattctcaatcaataaaaaaaattttaaaacacagagtgttttaatttgtttcttgtttttttttttccattttgaaactgtatagcttcttctcctacattttttacatactggaaaaccttacagggaaattaatccatctccaaggaaaattaatatgaagtatccttgagaatgactgctcaaccatttctgaggtgaaagagacacaatatttgtatttttaaagggtggtggaatatactgtttcctctgtttcatttgcctaattgaagataaagtctcaaaccaacaaggaagccagtgtcacctccacatattacccccagagaatcagaacactgttttaaattatttattaaaactctcatatgtgtagctatggtcccaaagcagattcttttcacctcagacattttcaataacaagtggctcactggtgggcacaagaagagttttagttgttttgttgagtctttttcatttgagttatttatgtgcttttaactatttaaattgggattttttaaaaatgtagtccaaattctgcatgcttataaatggaaagtgagtctatttcgttagttgaaaatcatcagaggagaaaaaaatcagaagaaaatagacagcataactttcacataccacaaatcaccccacctaattatcaagataagtaaatgtttatcatattgaaactgtcttgaatagaacataaattaataatttatctctcacataaatatttctaaagcccttgccactatgtcatctggcattttaattatcaaccagccaagctggaggtgtcacttggacattcccattatgcagcctgggatacagaaaatgtggcgcggcacctgggcactgaaaaaaagatgcacttttatgaatagaaaggtcatgaatattgagaatgtgcaaatggagggaaattaataaattaaccaggatatagcttattaaactttcatatcagtaatcatattaaaatatattgcaagtattgagtaaagtgatcattaagtattttcctcctcgtaggcaacagaaccttctccagggacacattaaaacaattccctccacagtgttagccgagattatgtaagaccaggaaacatgttgactaaaaggagcagaatgaacatctgcacaaggtagagagataccctccaaaataattcttgggttacaagtcagtggaaaaagaaggaagttggccttttccatagcctaattaacattttgcaagcttcatataatttccaggaccaccaaagaatacatgagtttggcaaaatattcattaaaagcaaaataattcaaagtacgaaatgagcaataacttattataatgccatctagcttgctcataatttagcctgtttgctacctctacacacaaaacaaagaattgaggctaatttttaaatgaaaaattaatgcccttatttttttctagtattttaaaatatttctttataacaaattaaatgaccttacagattctgagtctgtactttctgtgtcaatgagcttttgatttccatacttccttaacaatttatatagtttgtcccaaattgttagcatgtacaatatatgctgatattcagaaaagtctgggaaacgttatcatgactggctctataaaatctacttccaagtttttgcactagcttttgacatcttgtctgggacaggtgagaaattacctttgatgggcctttaaccctggaagagagcaataagagaactcacacctgggccaggctttaggaatgctaagcctgacatgccactcctgacagcaacagttaaagtcattactgactagattttaacagatatctgttctttacggctctcagaccataggtaactccctaggattaggctatatctctcatggattacctcagaagcccctaaatccattatctcccattgattatctagggaacccccaaattcaatatacctagtctcaaaaaaaaaaacagatcagtctattaattcatttcttatttatgattgaatacaaagttctgagagggatgaagagacttaataagggacagattctgcttcccaggagtttaccatatgatgggaaggagaaggtattatagcagcacaatgtaaaagatgccaagcattattaatgcaagccagaactagtgtcaccttggctcaaaggagggagaaagtattatcaactgcaggattcagggaaaaaaaattggaagaggtaagacttaacttagctggaattttaaatatagatagtacatggatataaagttacgatgaatattgggcagcgtgtgaagctggggagtattagaacatttgaagaaagcaagcacatgggtactccagaataccaagacaagcctctgtttccttacaagctgtaaaataaagtgcaaaaactgataaagtggtagaagatattttgaagcaaaaatataataagagtctacattaatatgattctgaactactgaagtatacacaagctaaccagcaaacattaacccccaaaatgaagtgatattagataatctgttcagcctttttgtcacctgcaacaaattaggctttcaatatgcaaaacatcttccttccagaaaaacaaatgatcacgattccatttaattgtaacttaatgaggcataatttattttttaaagtgatatacaccaggtgtgtactgaggaaactggcccagccaaaccctagtacttccctttggaaaaagcctcaagctagctagagactgttttcctttctggaaattttgtttctgtttgtggcagttgaaatgagaggtagaactggtaacttgcaatgctcatctatttactaaaacatgtaccttttgaagtaacttgatccaaaaaatattcatttatcatagaaaggatatagtaggaaagtgttaggttccaatgtgaacaaagataaacattcaaatgtcatgtaaatctcaaagacagcttagatgtacttctgattcctatgctaaaagtaaaatcatacgctgagcacttctttagaaacatttggactagatagagaaaataagccctatcccctcatattatattttaattattaattctgggatgacactcatcttcagaaatcaagttacatctctttaaaggtatatgattcagaacatgttagtgaaaatgtattttagttcataattacatattgctttaaacaattggtgtcataaccaattagtaaagttaaaacaaatcacatcctcccattttacagattaaaattacagaaggctagaggtggaaggagccttggcactcatatgggccaaccatccaccctgcccccggataacctatcacgtttcccttgaaatgtcaaaaaaaaaaaggttccttccaaataaggtcccttattcctcatgtttcaccccttttgtatgcttgctagccttaattttcacataattctaaaatatctgtgtccagctgacatgaaagcaaaaaactggtaacctcttaagaaaactatgtgatatcaaacctagtctaatcacacaaaataaactcttaaatttcagtggtcaattcagagttagccaaagcggttaaatcagcgacatggctgtagaaagtactggtatcctactacctgaaagctgacccaacaaaatcgtttctctcctaacctccagtctctcatttccttctagatactcatgagaggcatttccccctcagttcacgaatattaacaggtttccctgggttctgtattcataatctacaaccccactatgaatctggctgctgaaattcatttgtgtaatgctaaaaatactcaccccatcccccacaccccagagcattgcttagccacgaagccagagtacttagtctgatttgaataaaaggtatacagggcacaacaatgacaatttgatttttattattaaaaatgatgtgttaaatcctcaaagaaaatgtcgttattgcattagtttaataaaacctctcttttattacaatatttctttattaggaaagacagcctatgcatgtggcatttttgtcggatggggtggatagaattgagcatctaaagggaattaatgtattctgcaaatataaatgcatatacaaaagtaacatttgcagacaaatgttgttactatagagatatattctgcaaagcactaaaagactaggtatacatgtgtatatgtatgtacagtacactgcaattggaaatactttctccctcctttgaaccaaaacagcaatagttctacctcacatttatgagacatcttttgcactgtgctactataaaaccttcctcccatgatacagtaaactccttgggggcagaatctgcatattttgcacttagcggccagttggtaatatataggaatggttctaagaaggcaacaaatgcatattttttaaatttctgggagtgggagtcctatctttgctgaacagcgaacagcaggctctggagactacatattgaaaacatgactcacattatactcaagatcttttcatccagcctgctgaaaacaagataactgaaactgaaattttgggtcatgcaaacttcattttagagcaaatatttcaggcaccctaagtctgtaatttattaagtaaaacacttgtctcacagatttgttttttgtggatacaataaaatttcacttgtggcaactttcacatcagaatacagtacccacataacacaaagtgagtagatacaacagagcattcttgaagccaaaacagtctgtgttcccttaactgcaatacctttgaccaagccacatttgagcatgtacaatagaggaaattagccaaaatcagattcctggcaactttaatgttttttgtttgtttgtttgtttttgcatacttaatctacgtaatgattatcccttcctccttggtgtctctaggaagtcttaggtactggaataagaggctatgcacaatccaagtcaaaatttataaaacacattagcaccaaaaagtgaaagcaaacagaactgaacaggttccctttggaaacgttttactagtagtgttcttcagctctgggcacatacatggtttctactcacacctcaagtacctggcactatgactatttcattcacaaagttctgggcccttcttattcctagtttccatgaatgttccgtaaaacaactgttggcaacctgccccaaaaatttactagctttggctactttgtcaaaacattggcaaaaatagtactttcctaaaacaaaacaaatacatttattgaatatttatatctcaaatgtatcagatgccttcagatataagcaaagcagtctattaacacttgagctgactttttctgaaacagttacaaaatattattctttcctgctgaaatatttctgcattagttttaatcaccttcagggtcaaaagcatctgttctcacatagcacatgggacacgtcacagtcctaatgatttcacaaaaggattactggtttgaaagtctgtttacccctgtacctctttgaagaagggattatgcccttcatcttccactctgtggtagcagaaatgattgagaataaagtagttatgagtatgagtcatgaagtcagacttgctggattcgaaattgggctctaactggacaagtatcaattaatctccctatggcacagtctcctcacctgtaaaactaaaataattctgcttcccttatagggtcccctagagagcttctaactgtatgtgatacatactaagagtttaatcaatgttagccattgttaggatgcctagtatagtttctgaatacttaatatttgatgaataaatacataaacatcacagtacaatttttattttacatctacaactttaaatattcaagacactctagttatattttgctaaacgtcttctcatagagaaggcagaaaatataagtaacttacaggaaatggaataattaaaactatttgacatagagaaggtataaagaaaaatgtaataaattatatgatgcaaaatgaccacatgaatattctaggtaacactaaattaaaatattcaatttatacttcagaaaagtaaaacaactttctttctctaagtaactttgctatctttaaaaatcagctttaatctgtatcactgttcaaacatgggtcataattattagtggatcataattaacatatcataactaactttctattatgaattggaattaaaaaaccttacaaagtaccaaagtgtttaatacatggtaatagcattgttccatgaaggatttttttctttcatgaagcctttgctttagaaacatacagatagggagaggtagaaatgagatatagctagagacagacatacagatgtgtgtgcacatgctcatctgggggtgtgtaccagctcatgatgtaaaaagtatttcttataggtattgcagtcagagaactttggaagtaaattctgcagtctatactgacaattttagacacagaactgtatacagaattgaaacaacctagtaatttcaaattgataacaattatatttttctctcagcatttctggcctttaaacttccttcactttatttgagcaaatatgcaattaacccaaggccaaatggtcatcatttcaataaatgaccatgaaaggaaaacgccttgtatatatttttaaaattgctttaattgagcaatggtgaaaaatatataaataacagaatttaaagctagtgcttccttgtatttttttaataaaaatcatactgtaaatataacatcactcagaatttcgggagactagttaaataatacaacaatggactttcacattaaaagtgcaagtttcggccggatgtggtggctcacgcctataatcccagcactttaggaggccgaggcaggcagatcatttgaggtcaggagttcaagaccagcctggccaacatgaggaaaccctgtctctattaaaaatacaaaaaaaaattagccatgcatggtgacacatggctgtaatcccagctactcgggaggctgaggtggaaggatcacttgaactcgggaggcagaggttgcagtgagccaagatcatgccactgcactccagcctgggcgacagagcaagactttcatttaaaaacaaacaaacaagaaaaaaaaaaaagtgcaggtttctactgaaatatactcactagaggtaaaagtcctcattgaggatagagacctctatctgtgtaaaatgagtcaatcattccctgttagagaatggtgaaacaagcttataaaacttaccaaaagtgagttttctttagtaaaaacagagaagcctgaattttctataatgagtctggcaactaatttttaagaactttgcacattggtcagggatgaaaggaaaagataggctgggagtgatggctcacgcctgtaatcccagcactttgggaagctgaggtgggtgactgcctgagctcaggaattctagactagcctgggcaacatggtgaaaccccatctctactaaaatacaaaaaattggccaggcatggcagtgcatgcctgtagtcccagctactcgggaggctgaggtgggagaatcgcttgaacctaggaggcagaggttgcagtgagcagagatggcaccactgaattctgggcctgggtgacagagcaagactctgtcttaaaaaaaaaaaaaaaaaaagaaagaaagaacaagacagaccagtatgtcatcatgtttgcttcttctgattctcttgcatgagttttgtgaaaggagaaaagaaaggtcttcttttacatacaagtctctacttcaggtggatttagaagtgagaggagagttgcatatgtttgacagctgctaaattagccttctctataggcagagcacaaacaaagccatcatctccccaagtctctttagatgagccctctgacctatcaatccacgttttgtggctgagtgcctgaaaaaggtgccaattaacaacagatagtcttatatgtgcaaggggaactaaagggaacctgctatctacagggctaccctcaagcaatctaataactttgagacactgctatcctgggagatattaatattattataatctgtaaatctatgaattcaagctagtgatcctgaaatgaaagactgtttattttatgaagcaaccagggccatctcttcctactttattaatttaatgttctgaaatcaaaagagggtatattatttacttcaaaactcaataacgggttcatgcttgatctgcggcatttcatatttacagctcatctttcagtgtgtggacttccttttttcacaggtttccttgtcattttataaccagctcactggaccatggagtcaagatccctggatttacattgtgttctattactctatgacttgctgggtgcttgtatctctattggatagtgagaaataatgatgactgagaccagacgtaggctgacagaattctgaataccttaaaggtcaaattttctagaaatataaactgtatgtatgattaaattgtgccaacctttggctaacaatatgtataactcaaacaaaggagttaaaagagaagtttctactccaaaaaactgactggtaacacactgaagctcagactcccaaatattttggttgccaggattttcatgttattgctacatatcacttcctaactgtgccacttcaaaatataatgtttagtaagtcctgagtcatttttaaccttaataatttggggcatgaatatactataaacactgtgtcaacagagcataaaagcaaaagccatgccatttcacatgaatgtttatattttagcagttgaccttactgtcagctttcctgatacatcgttcaatctaattttccaatccattgaaaacattctccagttgctgagtgacttcataaattgtatttatgatccttgtcttaagtttcttcaaatgatgtggctttgatgagtaaactgcagacttttttgcaaagtctcataaaaactaaaagtagtcaaatgaggacaggtcaacaaaatgagttcccaaaggatttttaaaatcctgttctctatcacgtaagaccaggatgcacagctttcccaagcaaggcctttgatgtaaggttgcaaattgtgtaactctacaactttttcaatgaactgaaggagcaagataccaaattagagacttactgttacaaaagaatagcacattttgcaaaacacatctgtacttgcaactgaaaacatgtttccaagaaccggctcagaagaactagctgagacacaaaatgagcctgaaactttcttaattatggcatgatgtgctagaggcagaaaaaaaccccatacaacataaataatgagtatggcaaatgtttcattttcaaatgatacagtcttcttattgctaattccttgcataaggatgtttcctgaactctgctaccaaggtaaggagacagtggtatagagaagatatgaggatcgcacctaatttcccttttttggcattctaatgctcccattcacatgtggcagggcatccgttccactggatttagcctagtttggatcaaagcttcctctacttcatttaacagatttgctcagatggaaggtctcagaggagaaacaatgttagtaaaagggggatttctgaacatacgaatatgtaggtcattggattttcaaataaattagagaatagtttatctattaaggaagattcgctgtacatattttatgaaatcatgcttattataggtcagtgggcattctacaaccatccctcagtaatattaagtcttaaaatactgtcataaacctttccatactggcataaatccctgattaattttttaaagtccacaaagtaacaaagggcaaaagaatgcttaaggttggaattcataatcacactgtcaaaaggcaaagatgtaaacaaattaaatagtcaagcaacatatttcatgtacataggcctagtaagtcaaactatgtcagcactaaaataaattcaggatataagcaagaacgaatatggaaaaaaaaggaaacctgatacagctgcttattcccacagacactatgtgcatcactgcaggagcacaggaggagtagggccgagaggcaaagccactctcaaagccacagaatcacataattcaccatttggacccagtaaggacagttttcatttaagtcaagtttggtaaatctcataaggccttacatccaacgtctgtttctgtctcatttttattcattctctctctttcctccacattcaatatccataagtcagtctggactatatcaatactgacccattgaattgcagagctatagggggcataggttttaaacaataatactgataatattttcaaaagaaaggagtaaaaaattctatactagttccataacaacatatggcttttgacttgcagagaaagtagacataaaactatagataggttttactcaaactactaccctatggcatgaccaattaggctggaaatggcgtggacctataatctgggataaaacgcagatcctcagatagagactaccacaccagtgatttattaagatggacttccaagggaaactgctgagggagtgtgagaagcaggacagggaagagaagaaatgcaagcaaagtcccagcttcagcctggtcctgcagagcgctctggagtggaagttatgcttcagagctgtcgctactacaggaggctgggagctgccctgttgtcatcctcctgtacccatcagatggtggtaagcatttccaactctgccaggatgagcagagaaaatcagtagcccaaactggagagatgttaacggaaaagcctaacagcagacgcaggctttcagaagtaaaaccatgggccggggagcggggaggcgggggagcatcaaaaacagagctgggatgttatctgcctgaggctcctccagtgtaaaatcatccatctcactttgtggccacaggttaaagtgcttagaaatgtatcatgggattgcctgaatattaatgaccaggtcagaaaatgccttatcactttcaccttactgttttcactgggtctcatttgccataaaagtcttcagagacagaaagcagggctaatctcatctttcaaaagactagctaaaaaaaaaaaaaaaagagtggtgatactcagaatgtattttacttattttacataaggtcataatgacctaatggcacagacaggacacaaggctcagccacaccctgtgtctagaaacacgttagtctcaggctcatgctggagatcccatatcctggcattgcatgacctctaatgtgctgtatccctaccccagaacaagtgactcaattttatgttcctagtttagaccatgtatgtttctgttagcaaaccaaaagagaaatgtaaggataaaaataaataaataataaaatattggcaaaaggctgtctatctctgactccagcagatgccatgaccttgtcataaagtgtggatagggcatcattttatcaaacaaatacattttatattcttaaaagacatatttattaaaataaaaataaactaaaaagaagctcttgaaaatatggctctattctcttaactgtgttattttacatcatcaaatgatatggtgacaatgaatcagccataacagggtaattaatagtttctctttggagaactgacatttgaaatgttatttattatgaatttaagtttttcatctggaaatcttaaacatgaaaaactgggcagggttttcttttctaacagttccaggtttatttgtaaatgtttacatattattttattttatacacacacacacacacacacacacatacacgatttgttcttggtataaccatgaagcacaaatccaggaacacaaaatataaggtgacaaaatgaacacacacgatttgctcttggtataaccatgaagcacaaatccaggaacacaaaatataaggtgacaaaatgtattaaaatgctttttattgaatttgataatatatgaataatagagatcatgaactatttctggaaaatattcaatagactgaggatatgctacaatgtttatttttgtttattatagctggcaagtcattatatcatccataaacatctgactccactcaaaaaagtctaaacgtttggaaaatctatggttggtttcatggggcataatataccatattttccatttaacaatgctgctggtaaaaccagctgcccagtccggctgttagtgactacagtacatacagcaaaaaacaatctgcctgctgacctcctgcttaagttcaaactatgtcattctgtcagtaccatctaccttgattaggttgggctttatacacaacaggttatgatcccagagggatgaaaagctttcctaaattaaaagcagaattttaaaaggaaatactcatacattcctacgcagtttccatttgatatcctcaaggctggcccatgaactcaagctcatgttgattgaaagtgaatgtttctttctaggtgtagccatcttacaaatttaatggcaggaggaaaataataaaatgtgtttcatgcttcaattagaccttttataacttggcacttgaaagatggcaacgccaaagaaaaatcattaatccataaaaatagacaaaaaggattatatgggagaagacagacctccaggagtctaggtccttggcaaagtatacactctcgccaatatggtctgtctttgttttgcctcattgtgagtcttctctcatgcttcatgctacttggataaaatgtatactgtatttgcttctaaaatccaaagtaatacaaccatgctttcaattttatccttagccaaaggagctgtatacataaccaggcaataaaatgttggctagccatgaaatgcctattcatgcacatgaaggacagatgaacgaacacacacacacaacacacacacacacacagagacagagaactgcaaaatacagagccaaaagatagatccttccaatttttattttgcagtagtatgcaacagactttctcaaaaggaccagagcctttcataaccccagtccagacaactatggacacacaaatattgcccgagtactttgaatcacgagagaaagtggaagagtgatgtctggaacatgtgagagtctctcaggacctccaaactcattttcaagtgatgttaacagactctgtcaatattagaatgtataaattagctaagagtcaagggaacaagagatttttacctctcttggcctcctgccataccgaaaatgtcagcaccaaacctcaaacagtcccactgtgtttcttccttgctcccagtcctgaagttccagcaccgctgaagaccgttaccaaaccacaatgattggtatcatcaccagttcatgctgtgaacttcccaaatcctgtgatctcaaattgaccccctatcacttccaaactgtccacccactttggcctccctttcaacaccaaattttggaaagtgtcatgtacttacttctgcatcctcaacagctaatcactctttaactcctgaattctggctcctgtccccactactttaatgaaattatactctaaacttcgccagtcttctcccaaccaactgccaaatctcatgacatggttttaagcctctctctcttaacttctcagctttccacaagtagacaagtcttcttctggaaactctccacgcatgtcctctatactctcactactgtctccctcttcttccttctccacctgcccccatctcctggcatttcttctctctttcctggggctggtgctgctgctgctggtggtggtgatagcagtgatttctccccttctctcccctgactcttccatttcctgtcccaggctctgtgacaacatctctaatctcttgctctagtcctgataactcttcttcctagcgccaaactcatattttctttttcttttctttttttttattattctagggtacatgtgcacaacgtgcaggtttgttacatatgtatacatgtgccatgttggtgtgctgcactcattagctcgtcatttacattaggtatatctcctaatgctatccctcccccctccccccacaaactcatattttcaatgactgttgcacattttcacttaagaagttggtcaacacttcaacgtcaaaataacccaatctaaaactatcactttaaccttactccaaccactctttccatgtcttcctggattcccttcataattacacctttattctcaggcatcaggcttgaagcctggtgtcagttctattcctctctttatccatttatacactttctgtccattttatttccaaaatatttcttctctgcaccctccccagcagcctagttcaaaacctctgtacatttcacctggatacttgcagtagcctgctaaatgatattcctaccctcttgctatcaaacctccataagacctaattaagatggtgggagcacagcatattcctacctaagacctatgacggtttccagtgcctgttaaagttcagagctcttgtcttggcactcaaggcctttttcaatctgtgtccatcccttttaagttttattatctacctttcttatcaactaccaactatacttgcagtttttatacttacaaattgataataactctttacaagcaaagaaaatataaaaaatatctttacaccaaaaagagtagtttttcccataaaaaggtagaatatatataataagagataacaaaacttgccacgaggccagtaagaaaatcccaaccattaacaaaaacttatttttctttttttctttttcttttttttttttgagacagagtctcgctctgttgccaggctggagtgcagtggcgcaatctcggctcactgcaccctccacctcctgggttcaagtgattctcctacctcagcctcccaagtagctgggattacaggcacacgccaccacgcccagctaatttttgtatttttagtggagacgaggtttcaccatgttggccaggatggtctcgatctcttgacctcgtgatctgccaccctcagcctcccaaagtgcagggattataggcgtgagccaccgcacccagcacaaaaactcatttttcaatgactcattaatcatacgacaatttcaaaactaataaaaatttaaatcgcctacataatagaaatacatttcaattcaaccagagatccaacacactttcgaataaagagagaaaaaatgtattaactgacttaacaaaaacgctatttatttaactcacgcagtattgcttaaagagtatctacaaaattcttacctcaatgttttcttgcaagagacgtggaaaccaaaagtaaacagaccctctttaacaatgaaccactgataaacataaaatatttataactggtataacatttcacttaggtgcattttttgagtgttaacttgcatcaggcaatccaatttaccaacatttatcagatttctccccagtgagagttttcacttaacttttttttttttttttttttttttgagatggagtttcactctcactcaggctggagtgcagtggcatgatctcggctcactgcagcctccgcctcctgggttcaagggattcttctgcctcagcctcctgagtagctgagactacaggcacgcatcaccacgcccagctaatttttttgttttgttctgttttagtagagatggtgttttaccatcttgcccaggctggtcttgaactcctgacctcaagtgatccgcccaccttggcctcccaaagtgctaggactacagacatgagccactgtgcccagccccttaacttctgaagtaatcattaaatttggaaacattcctgtattttccaaattattgaggtttcaatccagcatgctttctttcatttgtaaggtccatctacagcgtgtgttatcatgtgtctctgaacaggtatcagataaatgaaagcattcctacattctgtacgttcacagggtttttctcagaaatcagttgttttatgtcttcaaattattcctgcattttttaactcaacatctttcctatgaatgtctttaccttaaaataataatcttcttcttcatcatctttgcctgctgtactttattaatccttcaaggtctaacccattgacaacctaatactctagagtgttgtttacatatgtgcttgcccattatctttttcctctttgcacccacatagagcttagcttcctgccttgcatttacgagggtgctgaaattttaatctactgttttcttgaaggcttaccatattcattctcctggaagtattcctcacctccagctcaccatgaacctccaccacaactattgcttacactctccaacattactcataacacttcacattttactctaattatctggttacctggttttcaccactagatcgttagctccccgagattatgcacatctgctttgttcttactcatataagggctaggtaagtttttctcaacatgcggccccggatcagtaccatcataatcacctgggatcttgttagaaatgtccatttctgagtccaacctcagacttactcaatcagaaactatgggatgaggcccagcagtctgtgtttcacagccctccaggtgattctgatgcacactccagtttaagaactactagcagaaaagaatgtcttacatataagcaccctcaataaaaataagacgtgtgaattaactgtttacattttcaacatttagtgttataattggcatataattctctcaaacattaaaaataaaagtaaactatccattatcattttatcaatatcttaaatctaacttttatgttttgaaggatttttataaatttttaaataaaactttacttataaaattataaaacataattttatttcttttataacgttcaaaaccaagggaaaaaaatagattgtctgggcatgcatagttttataatttgttttaaaaaatggcaagagactgataatcacaaaattcaagatcagggttacatctgcaaacagtaaatggagaggatgagagagtacatacccaagtcattagtaacatttggggtcctgagttgcatgttgggttcaaagatgtccattacctcatcaaaattaatcaattagttaattaatcatggtcatgcatggatcaatggtaatagcgtttcattaactaaggattattaattaatctaattctatgtcctgagatccataaagctttttaaagagataaaaataattataacctatctcaattctgtccccagtattactgttaattacagtgtttaatgctaattgtacctgtgtgcggttgaatgccactcttgcaaagacagcttgggacacactggccctcttcagctcatctctgacttgctggtagatatctggagagacttccacggaagagttggttggctctggcttaactgctctggggatgggtggatggttcaggaactgctggttgatggcttgaggatgctggtgagccaggagccggctaacggcaatctgttggtttatcagatgggccatggctatttgttgccttacaagttgtggactaagctggggagaaagaagaccagggctcatgatgggctgtaatgcgggcacttggtttcggattggagtactgtggtgaatttggctgtgaggagactgttcgttggttttccccagggatgccagctggttcatatttggtaaatgcattggacgctggcccagaacacaatagtctgaaaggttttctcgttccactctttccactgttaagagataaaagtgataattaatcattattttcattggtacaatttattgctaatatatgtagaactgaattatcatacttttggcatgttaataatataaacattttttcatacaacgatggaagctccagcataaaagtgatattcttttctgctaaatgttacaatagatttttttcatggaacatatgaaagaaagtaaaattatttgccacttcaattagttaaaattcttaaaagtaagcatttctttaaatagccaagacagaaaccactgaccattctaaatcctcttagatcccccaagctctatcatctccccaatcaacctttgttataaaagcaccagctgttcctatcttctgtagtatgtagttaatggttatcaggaaatgacaaggataacatctcctgccaaattaagtgctaccttctagtaaaaagctcacataaatattattatacagctatggaaatgttcatttaaaaatgtctgccacatagtatatccatttattgactcacttgctatcttttttatagaaatgtttctttaagaaattgatattttaaacattgtgctatgcactcagataagaaaaaaaatcacaaaattaataacatcacctcaacttgccattaaatgaagttctcctcaggttatctgctttattacattatattgtgctttaataaagattaaaagaataactttgaaagggaaaagtaagtatcatatatatacaagcataaggcaagtatttttctttccctaaaataatgtcttaggaaagacagtcacctcatagccaaatccttatccaagtctctgtattactctatcatgaaaaacaaagtttggtttggagaaaagaaatggggctgaagcaatcccaacattattagttttaaatgcttataggtgtaatataatctaacaagatctctttttcaaagcaaaaaatccatacaaatttagaaattatttcttataattgcaaatgctggatatgactatgcaaaagtccattaaagataactttaagaagctagagatcaaacatattcacctatagaacacatataaaaagtaactgtctccctattatacaaatggaatgtgtggtttgccatatagttaaccgtgacagaatcatggttttataaaaaaaaaaaaaatactgagtctcaaaaaatttaggcagaaatgatgtgtgctggacaactgggtgagatgactgaaaacaggggagttggtgatgacagacactgatgccaaatcacatgtgaagcactgaataaagtcaatgaactgtatgggtggaaaaaagtagtatttctaaattaatacttcatgtaatatgtgactttaaaaatgtatatgtggaaataaattaatacattaaaatgtgggtagatatttaactattttatatccatgtctacaagttttatgcatgcaaaatatcccattaggaaaacatgtgaacacccgtcttggtatcaccttatatttagacatgtacagtgctttttcctgctttttaaagaaactcagttaagctgggcatggtggctcacacctgtaatcccagcactttgggaggccgaggctggtggatcacctgaggtcaggagtttgataccagcctggccaacacagcaaaaccccgtctctacttaaaatacaaaaattagccaggcatggtggcatgcgcctgtaatcccagatattcgggacgctgaatcaggagaatcgcttgaaccccaggaggcagaggcaaaggttgcagtgagtagaaatcacaccactgcactccagcctgagtgacgagcgagactctgtctccaaaaaaaaaaaaaaaaaaagaaaacccgatttcttgcttaacattcctataaacttccaaataagtcaagagtttacttccaacttcttttagggctcaatttctaacttaatccttacaatgtttgcttgctttttttttttttttttaagacagagtttcactcttgttgcccaggctatagtgcaatggcgcaatctcagctcactgcagcctctgcctctcgggttcaagtgattctcctgtctcagcctcccaagtaactgggattactggcatgcaccaccatgcccagctaattttttgtattttcagtagagacggggtttcgccatgttggccaggctagtctcaaacttctggcctcatgtgatccaccagcctcagcctcaccagccattgcacccagcctaatccttatagtgtaattcatttgttttacgtatcacctttccttcataaggttaagaaaacaaattattttactcatcttctaaaggcaaacctttttcaattattgtattaattaaactttaaagtacatagtcttaaaatcaaaccaagcaaatggttaggagccttcagataacataatctaacagtttccatagaacaggaattaacatcataatttcctcactgaaaaaaaaggtaaagagaccatgaactgattccacagtaaaatcttattttatagacagaaatatttggtttcagttaaatatttgattcacttttgcttgtttatttgcttttaattcagtcaaagtaaagataaattcagatattaaattatgttttcaggttcttaataaggaaatattttatctatttcattttttggtggggggaggggcttgagaccgagtctcactctgttacccaagatggagtgaagtggtgtgatctccattcactgcaacctctgcctcccgggttcaagctattctcgtgctcagccttccgagtaactgggattacaggcatatgccgccaccacacccaactaatttttgtatttttagtagagacggggtttcacccatcttggccaggctggtctcaaactcctgacctcaggtgatccacctgccctggcttcccaaagtgctgggattacaggcgtgagccactgtacctggccatctatttcattttctactgaaaaaacatagaaccatcctcctatagaatgcattatttgaccaaacattaattttccaaaattttggtattttcatttttcaacaatttaattacatttgagtgactttattttcttgagatatatctaaatcatataatttaaaaatacctcattcatagacctagtcaaaatcatgtacacaattaagcataaacatcaaagctccatgaaacctatatgaattggtgcagtaagagtctgaataatgtcagtccatattctttaaggttatatataatcattctttctatccttatgagtttccaggtggatccttataaattcttgtagttaagaagagcaactatggaagtatcttgtaaagacatagcaacatattacatccgtagtaacaccatgaagtactaactactcagtaaacattaatgaagacattgcaaacacaaatacctacctgttcaggtagataacagccagaaaagccagctgcagaagaactaggtggaggagggaaagtctaaccagtacaaaggtagcaaccactacctaacctcagccagtttctgtctttcttatattgtcatttctttagatttttttttgaaaaacaaaaaatctggattttacatgatattcctaatttttaagtgttagcaactaatgccatttcaaaatacaataaaagccaaacaaaacatttctgaaaaccagatctgcccataggctaccagttttaaaattctgcctctgagactagtcaccctttatgtttttcagctcctaacagttctaccagtaaaagccaagttctttactaccaagaatgaaaaaagaaaaaaaattatcatcccgactttaagaatgactaaggatcaaatgctgtcaaaaggatgcatctacaatgaccaaggcagaacacgatttcagaaaccatttacacacgtttttgtcttttttttttttttttttttttttgagacagagcctcactccatcacccaggctggagtgcagtggcacaatctcagctcactgcaacctccacctcccaggttcaagtgattctcatgcctcagcctcctgagtagctgggattacaagcatgtgccacggtgcccagctaatttttatatttttagtagaaacggggtttcaccacgttgcccaggttggtctccaactcctgacatcaagtgatccacccgcctcggcctcccaaattgctaggattacaggcatgagccaccatgcctggctgattttacctaaattgaaaacattttaatttagttcttgctgccactctcataaaaataatatcagaataacgtttttagcctcttaagtcacagcaagtgaagcacagatgcttaaaaaagagagggagtatcaggatgtgccagactgtatcagaaaattgagcctgagcgttctttctttttctctttctttctttcctctctcccttccttcctgctttcctgcttttctctttctcttcttccctttactccctccttcccttctctcccttcctttcccttctttcttttaaaataatttgaaagtaatcacaatgtctgaaacacagacctaacagcagtgcctggttttgtgttcttgcttttttcactgtgtaatggaaaacatcatgttaagtctgtcttaaactaaaccaagaccaaagacatcaccttggccctaagggccatcttatccctgcagtatttagcagaagatcagaaatcctggaaaaaatgaagggtaaaaggtagtgctgtctctgacggtgaaagcaatgttcacattcacaacagaaaatattctgataaaggcaacacgcttacttattaaagagacagtaaaaacacaactgctggcccggcatgttggctcatgcctgcaatcccagcactttggaaggccaaggagggcggatcacttgagatcaggagttcgagaccagcctgaccaacatgatgaaacctggtctctactaaaatacaaaattagccaggtgtggtggctcatgcctgtaatcccaactacttaggaggctgaggcaggagaatcacttgaatccaggaggcagaggttgcagtgagtcgagattgtgccactgcactccagcctgggtgacagagtgagattctgtctcaaaaataaataaataaataaataactcacaactgctcccagggctttaaatcagagctgcaatttaattcacagtgaacttgattctactgtggctgaagccttgagggtgagcactggagagggaattgcctggaaaggaatgatgtccccagtttctaatgtaagtccccaaacagaacatggtttaagaaaccgtcaaggcaagggaggctcaaatgcttctacgtccagtagctgtgagacttttggtagctattccaacatctggggaaaggtaccagtccagggaccttccagataaacagttcagatatggagtctgttcaggtctctgagaaacccagagttctaagaggatcttgcagattccttcaagtttcctgggactgagtgaaaactgcagggaatgggcagccattttccaaccaccctctaaacttctgggattccatttaactctaaagtaggtagggcctttgtagccctatattagaatttcagtaactcctaaaacctcaccaagttcacagcgacaatgctctaaccaagagcactctatgaccattagctattcagatgctcacaattgctgcctgtggctggttattcatagatgagaaacttatattcctccctcaggaatttacctgcattacaattaaaaggtatttggtccaaaaatcttatttaagacacttgttacggtacatccaggaagccaggtatttattttaaataacataaatccctgatatatatttatatattttaggttgttacaagaacattttcaaaactcaaaaaataaaataatacacacacacacacatatacacactatatatgtatatatatatagtgtgtatatatgtgtatatatacaaggatgtgtgtatatatgtgtatatatacaaggatgtgtgtatatatgtgtatatatacaaggatgtatgtatatacatatgtatgtgtgtgtgtgtgtgtgtgtatctatatatatatatatatatatatatatagtctttcactcctatattctggcacttaatttttattatttcttttgcaattatgtaaagtaaatataataaaatctcaatgctcaaaatataatccaatgacttagtgccccaaagtatagtttctgaaggtttttgagcaaaaggtgaagcacctgattggcacagatgcctgccaataatagcaaggtggcataggaaaggtagaaagaaaagcaaactgaaatttcaaaggcctgggttataactagatgagtgatctgaggattatctgtaaaatgggaagaattacctgtaaagtggtcttaaagtaaccttccaggttacttatctaagagcatctttaaaagtaccgttttaaaacaattatctttctcagaatacttgcttctgctctttactctttagcaggaatttaagactttccttagatatctctattaaactcaccattacaagaaaaatagttgtttatatagtggcaatagcaatattaattacagtattgctcttgcaagtttatcaatactgcaaaaaagatagataatatttctaaagctattattgtagtattttcacgctgtaaaccttaacacagttgcttttgtgaaacagccccttgggtttgtccatagttataatgggtagaaagcaatgaattgggtaaaaggttttgcactgagaaatttccagaatctctggcctatggatttttctttaagccattaagatgcttatgcaaatgtaaatggattagcatgaatgagtgctaatggattccttaataagataacactctagtattccccagaacctctcctagaaaccctgggtagaagaacataagccaaaaaaaaaaaaaaaaaaaaaagaaagaaagaaaagacgacggcagaatttctctacgattctttcaaccttagaaagtactctggaagtgattctacaaatgtaaaaaaggacactggcttgcttttggcactcttagtaaaaatgttgccaatcaaaccaacaatttcaaattggtacccaaacattagagcacagaaaaaagatactcgagcatatgaatgccttaaatttacaaacctcctctccaggttctctgcttccccaccttatgctctaaaaccttgaagcccagtttttaaagacaacgatcttgtctaataccagagaaatttaaaaaatgtgctctaggtcgaataactgtccaaatgcagataaatatttaggaatattcaaaatgattaaggctgctggctctcgcctcgtaataagaaacacaaaccacatggctactttttcctctttttgtgaataactcaaagtcaagttctaaagcctaaatgtttcacaagtgctttttaatggattttctttagaaaaaatatatttattataagaattttcatatttttactactaacatacctttttcaaactgtattggcatttcaggtaacaccaagccccaccatttatatagtagctgaagcactgagctaaatccctgacacatcattatcgtttaactctcacaacaattctatgacattgatattaagatgcctactttattaaagaagctgaagctcagttggcttctttaatgtcattatttgactttaatgtcataattgtttgatgttacaaacctgttaatggaagattctgaattcaaacctatgcctttaggaccctgcagtctgtattccgctgcttaagatgaactgcccagtttggggcatgtggttattaatagctttaggatttgggtcaggagcaatcaactttcttaccgataagtttcactttgtatttgcatgtttgtgtgcacaagtgcacgtggcacacgtatgtgacaggaaggatggataagtcatctgaatggtaaaagctcaacctcagccttcactgtatgctttgtgtaacatacactgaaaagactgtcaattcaaaaagtgatgaaatcattgattcctcaacagttgaatcagctagtcacttaaatagaattatttacattaaaattcatataataaacatttattaatcaactatcatgtgccaggaataatggcagcccctagagatacagtactgaataatcttaactttaaaaaactccatcaatatatttgcttcagacactttaactgtctgccacatgtagatgggtccataacatctgcctatgatttaaagtgcatttctatttgatgataaaagatagctcctttaaattcctattttgtcagtttattagcaattcattccagtcatctgtaagatatatatatgtgcctatataatcagtatataaatatagtgattatatttatttttataaatcccctcccattatcttatttttcttgaggccaaagcttttgtcccaaaatgagtgtcatcagcatggactcccacctgactgatgaaagatatgaatcacacagcagagagctttctcaggtaccctataaattctataaatagaaattatttctttgaaacaagtaaccaacaagaaatgaaactgggtatgcacactcacataatataacagcttgagaatcttgggcaatcacaaattcacatataattgaactatatgaaattggcgatacgtaacaattttgacctacaaaaatggcaattccatatgcttccacctgatacttattttgtctcctttcactcagctgggctacacattaatggtcaacaaccccactgtccacccaaactctttcattgggttaaaatctttttaaaaggtaaacataatgctaatttcccccaacaaaccagaatagcatcccgtctgccaacactgaatatgcctagtcactgaaaatacttctggtttattctctcctagtcaataactggaggtataaggtcaatttattatacaaaaaaaaattctgttaatacaaacacagatggacatgattgcagtagccaaagctaatagatctctcagatataaatcccataccattaaaacgaacaaataaaactaccagatgagttcaccaaatataatttaaaaaaattattgagcttgaaagagctgaagagtaaaagaaagaaaaaagaaaaaacaaaaaacttgccaccaaacccaaagattttgtttttctctaaatttgttcaagagaatttgtctctgggttgagaacttgcttgcaaagtccctgcctagagcaagatattcagagccaacttgttaactcctaataaaacagcccataagcaaagcctaccagccagcattgtgataataccatatgactggttttcttaggtgtattttccccttattatcaacttcctttttccatcatattaacctccacagaaacatatatccaccataaagtaactcaaatgtggacacctctgtttctttgctaataaaagctcctaggacccattatgttccatggaaaaagtgagcattatctacctttcttagtctccaccctctgtaccagaacactattgtcccttttggtttcaaacaatgctttatcacagtttgatatcattgatcatttcaagtattcctataacattctacataggttaaaactgcttatatctaataatatcttcatttttattctttattttaatctaaaactataatttctaaggtgaattcagcacatgatagtaaaaaaagatcatattgttgaaacttaacattactgcttaggaaaattctgcctttgtcagttggcattccatgtgtattaattctttaattcaacctacctgaagaaaagttaatcaaagaaaacaatcaattcatgattcattcttttcctctgaccagtctctgtgattttataggactttgatgttttaggccattatattgaggaaaatactcaataaactagctgtgaaaacctcaaaggcatgtttatcttaggctacacaaatgttctctaattcgtactttataaaggtattactgtcctattcaactgaattgactactgttaagtctttagctcaataactagtagaaacatagaatgattctaaccaatcacatttgctaaggacatttgcaacatgaactaaacaagcaaagatttttctttcttttttttctctcaattgacagatcaggtagcaaataagatcagtgcaccatataatatgtgtaaaaataaaactgttctaaatgcatatattcaaataagttcatctatattacattcaattatattaatatttactaagtattcactgtgtttaaggcctcatgctcacaggactctggggaggacagaaaatggatatgttcctgtgttcccaaaacctctacctctgaagttctttcaagcagcttttggcccagaagggggattagtcaaaaatcaaaatttctatggtacataaaacttagaaaggtgataccctgaaaggcccaatgttagaactcatagtctgatttgtactctagatgattatagattcatgtctattcccttgggagttcagaactccaagggtcaaataatctcaaattctcacaaatggtggaatgaaggccattcatcagtcaggcaaatagttaaataactgtctcccattaggcaatgtgatttcagtcctagtatcttacatagcatttatagttaaagtgcttcaagcaccttatgagcttaagtgcttttcagctttgaaccttgtaatcgtctaaggaaaattaggtaataatctttatttaattgatcaagaaaccaaaagagttctctgattttcacctgctggtctccccagtagaagaggatgtccccacaatcatcagattttaaataagctgggcatttcatggtctacacacaaagcctctcatttcacacttctgtagattctttgtcagcccccatcacatctatgtttttgagtttttttattctgtttctgggcaggacaaatggaaatctgaaactaggagcaatctaaagcacactccctccttgttccccagacatggtctgtccagatcctatttcaggtgttctcaccaccaagcccccatgccaatcattctctccttcactgctaggaggtcatgccagcccagcctcacacttcatggcatgagctgcccatcctcaccgtccactccatctctagaaccttccctccttacacatctccttgcccttctcccagattctgaagaaaacatcactattactctttctttcaaaggcactgcattatctgagcctcaaatccattccctcctagttggtgggctcttgcttatcactcctcttcctcttcaaaactgctggctccatcctctttctgataattacacttagccctcatgcttcagttagccacgtttagactctttcctctcatgtccttgccacccctccctcagtagatgcataggcttccctgttctcacacttcagagagacagctccctccaatgtcattatggtatcctttctgccaaagccaagagcctccaattccctctcctctcccctgcccctccactgcacccttgataacacttccccctggtaactcatcttcccttggcttcagtgacacctcactctctctagctgcatcttcttaactcctggcccttttcctctcaaagcttccagccctctcccgctcttgctctcctctttaaggaatgttcatttggtaccatttcaattgtcatccaaaaaagtgctcaaaaatttattctccatcctgtcctttagtcggctggtttcacatgtcaaacagcctaatggacatttctacctagttgtcaaaattctcactgaggtatcagcaatttcgtctccattggtattgtcttatttctgtcacaaccatcaagagtcacttaagctcaaaacctggattctgcttgcatgtctctttctcattctcatacccctacttactctcaccaagtctcatggctctcctctgcttgaacctcttgcattggtggcttcctgtctttctcacttgtgccactcaaagccagggcctcacttccctcaccattccatttccgtcaattactgcaataggttcgactttgcctacttccaccaggtgtacacaccagccttccccctcccacccacctcccttcctgccatacacccactcacaccctcatacagcttcagatggtgtctaggggaatcattcgtaaaacctcattttcaatatgtcactctcttgctgaaaaaccttcaaggattctcaaaatacgtcaactgggctttcaaagacccctaaggtgtgttctctaccttctcagccttatttttcattgttacaacaaatatgatcgcccagccaggtcccaaccatttctttttttttttttttatgtgagacagagtcactctgtcactcaagactggagtgcagtggcgcaatctcagctcacttcgacctccacttcctgggttcaagcgattctcctgcctcagcctcccaagtagctgggattacagctaactttttgtgtttttagtaaagatggggtttcatcatgttagccaggatgctctcaacctcctgaccttgtgatccacccgcctcggcctcccaaagtgctaggattacaggcgtgagccaccgcgcccagccaggtcccaaccatttctatcaacatttggtgtcactaccctccctatatccagctagttctacctttgccttttcactgatcaaaagcttagccattctgagcacctgttatattatagtatcaggataaatgtactgccattctagacattctggatagccacttgtaattttctaaacatgcaatgctctttcgtacctctgcatctgtactgatgatcatgcggttgcccaaaacattcctccttctcttttcctccttgctgcagtaactccacttgtccttaaggtataattcatgcgctgtctctccctaaccgcccaccccccaccccacgtcaaatctagcaagaagagtttccggactttcctctatgccaccattacactagtttatatcactactatatatttaccagatccatttatacagctgcttcccctgccaggttaaggacaacacaaccagaggtaggaagtatatcttacgtgtgtatggacatttctcactgcttctagcattaattatggcctgtagcagaagtgctcactaaacatttagttaaaattatttacttaattatgactacaattatcttgtgaggaagaaaaaggtaatgctctccactgtattcccagcccttagaatcctgccaggtattatatataaaatagaagctagaatttgtttttgaatgacaagatatgtgttatattataaagtaagcatttcatacagattgtaggcttttggaaagcaggaactatgtcttatgcttcttccaaagagtaggtatacatgaggctggatggatgaatagatgcaagagaagcagggaggggcgtaaggaaatagatcatttttccctttgcatcctttcttaatgtctatttaaaataacatcagaaatagtacaaatatgagtagattgcaagctcatttcttttaatctacaaactatattattaacaaacatttttatatctttaaacatttatgaataagtatattcagcccaacaaagcagttacagtacagctggaatgagcttcttaagatccatgcaaggaattagtccatgtctaagctgagtgctcaagacattccccacgcaccatttttccacttaaactaccaataagctttccattggagggccaagcaagcataggtgatctatgcatactatcagtgactatcacaatgaaaacacacaaggctctcctatatgttgaaaaactggtgagataaaaggtggctgacagtagaaatgatgtttctatttctatgaatccgatatttgtgacgacatgagtagaactggagaacgttgtgctaagtgaaacaagtcaaacacagaaagacaaatgctgcacgttctcacttatatgtggaatttaaaacaattgaattcatagaagtagagagtagaatggtgtttaacagaggctgggaggtgggagcagtgagatgataatcaaagggtacaaagtctcagtgaggcgaaacaagtggttttttttgagatctattgtacagcatggtgaatatagctaataattgagtactgtgcattttaatatcacagagtaagtctcagatgttctcatcacaaaaaatgtcaaatatttgaggtgatgaataggttaattcacttgatttaatcatttcacgttgtattaaaaaccataccatcactttgtaccctgtaaacagctataatttgtcagtataaaatacgtaagtaaatatgtatacaatattcaaaggattttatcctgccattactttcaacaagatacaacataggcagagggcagacaaacttacaacataggcagaaggcagacaaacttccttacagaacacttcatttagatctgaagctgaaagcaaatttctctcatgacagaaaaattaggtagacaaaagtaagttacttttacctcatcagagttaaacaacagcagaggcagaaggaccaggagttgattaaaggcattgtcctgaccactgataccaccatggctaagcaagggctgccttatggaaccaggtcaggggacattgatttctctattcaactccaaggcaccactttgtaaatgacacaatcatttttgagtacaagaggtgctttaaatgtggtaacattgtatcatttcagctataatgatcataattacttatttcttttaatcacaacccacttaaccactttagtacagaggactagttcaaggagtttaattttcattcaacatctaatctttgtgtttaccgaaacccttcatgggctttgtttactgtctgcctgctggcctggacgtttgatcttgcaagactagatcagacagggtcagataaaatactgattagtagaataaaccaggcttggggaagtaacactggtttttaaaatcctcttttctcccagctttttaatatctggcaaaagaagttcaaataaacaaataaaattaagacaactaacaatcagacggttcttgggcaatgactgagaaaagaaaagtgatggggataattttgcactctggccaaaatacagggtttggttaggtccactcattctaatggtattattttataacacaaataattttataataaccacctgtatttgtgtaaactttcaatgacccttcaattcttgaggcatattaaataattgggattgacctcaccaaagatgactgcttattttgcttttggtaccagatgacaaacactttagatataaaattattttcttgtaacttattaattaggacacatttaaaatatataaaagattctttattaaggcgttttcttatttttattatatccccccaaaagtagattgccatgagagtaaaactgatagtgctactacatatatgattgccacttcatttcataaaaatgatggggaaagttcacatcaagagttcagacaaaaaaagttgtgtaaaaaattaaaattttactaaaatgtgtagaacttaggaaaaaactacttgggtaaatccctcataatcccaagaccttaaaaataattttggaatagcatgaatgtttctaggtgtctatggaatctcatgtacaatactaaaactcctaacattaaacaactattaatattggtcttttttctttgcttttagataaaatgtacttttttttttcttatacttcggagcttatgagctctacattgtaaaatctggtccagaagcaattatggtatgtgatgatcagcaattaaaaaaaaaatgctgtctaaaccaacctaccaccctaccctacctacccactccattttcttcaatgtcaaatattcctgggaaacagattcatggtcttagaccttgaaaccagagtatacacactgtctccctatctattctgaagtaatgctcatgttaactcaaatatgtctgtgtcaaccatgattgtctttgaaattaaagaaaaaaggtaaacagaatgtgctttgctgtgatcactggggaaaataaagttaacatgctaagccaaaccaatttaggactttctaaagaataagtgtaaatagtttagctgaaataacaacaaattcaaaaaatgcacattaaaatgtttacttcaaaatttagacaattccatttgtatgtagtttttacatctgtttttaatgatatcaaattattgattgttcatttttctcatatttatttcagcattgactatagaatttgcaatctgatcttttttttgtccttccagtagacttttatttttgccaggttttagtcatatttactttgatctttcagagtatatcattattttaccgtttatttatttctatgagaagagaaaaaaattttgacctaggagatctatatgtggcaatttgtaacagaatcacatagcttatgtttaggaaatcatgtttttgattaagaagcaaccacttagttcccactgttttattaaaacagacattagcagataataggaaacatatttaacaatgtagcctgcatttagtttgggacctcagtaagttgacttaagattttcttctaagctgaatagtgcatagaagtgcatgtaaattggtaactttgaggcagaaatggaaggtagggaggctgagagggacatggaactctgacttctggggtctcagaaaaagccctatggtagaattctggtttcactactactggtttccaaatttggaattcattgcctttttttcattttgaaagcagggacacaactcttacaaatcaaatcattactttcccatgagaaatgagtcctactaggtagaaactcccacagcaacatctattcatagaaaaaggcttctaccaaataaaatatgcctgcttcagtccaacacttccctttttctgagggtcgaaagttaataaaacgcacttctctgggtgtttattttctgtacaccattatacctgtcatgaattctttgtttttcctcccactcccttggttgatgaatcaacaccacttgaactgttttatggcagcttgtgtttacttcacacataccttaaccttcccttttctcctcctactgacacacacacagacacacacacacttttcaacagcaatgactagctccatctctttgaatagtatgtgtacacagtgtctgacagcctcttcaggtgtggatccttgaccaactgaatgaaatcaaggtctcagtctgcttttacagcacttaaagatttaattgtgcatttactatctttaaaaaaaaaaaaaaaagatacagcttgaagaattaaagctccaggaaagaaaaaagaaaagtagaagatatgagtgttaatgtgcgaatgcacacacacacacacacacaaacacacacacacattctgtagtggcaattctgaaaacactagagtgaagagtttccaatctttctgaatctggaattacactccagcctattaaaagaggacactctcttactttctcttataacagcaagtaaatgggatctaacaaatgaccttgaagctgcatgattcttttgattttcagccgaagaggatatgtcaaagtactttaacaatcctattttaaaagaaaaacctggaggcaacacttacagaaaagaaaccttctgagccacacatcgatgtcttataatgagaaggggttattcatcttatattgcacaagggtgaatattaatatgcgaaagcatttgcccaaaccaggatctaacgggtcctaagaattttagagtctgttgaaaagaaatggatcttaattcaattttcagtgtacttaatttctcctgggtagctcaatattttggcttgccttataaaacatatatttagcataaaacactctcattcctttgtgatcagaaatgtgctgccaatgtttgtaaacttcatttcttcaaaagacaaccttgtcaaaaatctcccaaacactcaatagccaacaagcactactttgacatcctgtctcccctgagaaaatctgcaagtagtaaaagaaacaaattcatcctttacttttacttacccaccataaattgtcatttgcccctccgatgggggcagagtaagcaaggctatgaatacatattataaagtgtgataaatatgtcatacttatgcaaaacatggactggaaggaccatcaaaaccaatgttacaagaaattccccaaatcccctcagggaccctggtaggtaacatttatctgaatggagtgaaaacaaaagaatttttccaccactgacatatttgaaatggtcctgacatgtttaaaagtctaggtgatctaaatagcatgctatttactacacaaaggaactttattttcaggcccaaacataattctacatgtaatatattactgctagtatgactactactattaattattagtagtagtatactattatttgtcaagaggttactttgtgccagtattgtcttatttagtcctcgcatctacccagtgacctaagtactttgatgatttcccattttcagatgaggaaattgagtcttggtgaagttaaataatttgcttaagctcccacagctagaatgtagaagctaaagatttgaacccaagtctgcctgaatgcagagcccgtgttttcaccactgctctggaatcgtcgacacaggaacacaacatcaaactccatttctgaccaaagacatcctgataccccaacagtatctgttaatcagtacccaaactataagtgctgatttaacctagaatgacagcttttaagtttccattctaaaggattttggtctttgcaggtatcacttatgaaaactataaacttaacatatggtgctactaattttacttttacttcaaatatcttcttagttttaagggagccaactaggatctcatgacaggaatattaaagatctcacctttgtaaaaaaattacgtaaattgtatctaaaatgagcataaattccaaacaaccaacaactcatgaacctcagaaactgaaaacaggctttacaaacaaaaaagtcagtttacctttaatcttcttgtactttttataccatctcccaaactcctggcacttggttgctgacacattggcataatatgtgctatttacaatggatgaaatcatactctgaaaaaaaaaattatagttattttttcaaaatatgactacttctttttagggacaagaaagagcactttataacctgcactaacctcttttttcttttaaacttaaaacagtcactctcctgtaaactgaactattaacatcaaacacgattacctgaatttaccatccctttaatttatacaatgatagtgctttctccaaaaagccaaccctggggcaatgtcaacaatggaggggacagaacatgcagattaaatgcaaagaggaagaacagttgtgatttaggaaccagagcaaaaggtgagatcagatgctccagcatccgtaatccaaataatgcctttcagatgtttctgttccgcttccaactgcaacaagcttacacagccaagaatctgagaacatccgtgctacacactgcagaacaacatttagggaaataagttaaattaatataatttatagaaacgtgtgattagaacttgtgtgaaaattcaccaaatgaaaaaattaacagtgctattttagagcaggggaaactaaacacaatacttgtactgtgtttcaataaaaaatgaaccaaagctcaaactttctgagtgcttaggtgcatgattcttccttgctctcatcctcctcagcccaactgctcagctgatttgtgtgtattaatcattggggttaaaagagaagtggagcatagcctgacatagcactgaaaagttaaaattataattacacaccttgaattgaacttcctacagagatgcagttaatacagtatgtttgggccaacatttgtggcagatgttaatgtatacctgaaatgactgtgtatgttttatacatagattttatttcttattttttattttgtcctgtgcataaacaactcaagagatccaaatgacctgtgtaaggttttatatcttgccttgaaatctcatctttctcaaaaaaagttagccccagacatagaacagttcagagaaatcttagaacttctaacgacatttctacaaagtaatagagataaaaagagtaacaataaatcaagttatttaacaggaggttaaaatgccagcagacagaccttcataaactcccatttaaaacaacagactcctcttttttaatcactatgcagtactggtaggggaggggtttcttaattcaattcacagaaacctctttcgcagatggttagccctccccagttgctgatctaaacatgacaattcttttctctgagggaagatagtaaggataactcttttcatcccaaggtctgaacacagcactgggaactcaaagagctaatatcatcggagtgtatcacagaacctatgaggccttgtctcctgccttataggatgaccactggaatcctaatctcctggagacagtcttctgctttgcgctattaacgaccaagtacggctgttccctaactagctgagctagctcccgctctggctgagattcactctgttcctagactgtgagacccttgaggacagtgactatgtctgtttcatttttttttttttctatctcgtgtctcacatagttctgatgtgggatatctgagtcactgaaatttaacacaggaaaagggacagagatgagatttaaaagtgccaaactgaaatgtcatagtaataaatttttttaacatgaaagtagcttaataatagatgcatcagtcatactggtatatgtgaataaccacaaacgtacttgtcatctctctatcttatttgtatgaatttatcctctggaaaggcacaggatacacagccatggcaggagtcagagttaaactctgtattgccaaatggtctagaaagttaactaaaacgaacagtgtctaattactgcctggcactgttcctcaattcttcctggcccataatacgaggccacaagcccagacgactgcatcattttggccccagataatccaaattcccctcactctctaccctctctttgtccttgctcctgctatatcttcaattgaccctgcacaaggcagagtggcaaggaaatgaatatctgggctcctactggctccgtcggcaggtcctatatttcatataactcatttgtaaaggagatgttggctaccctgactcaattagatttgttttctgtcccagataatcataaataagttgttacctctactgatcacataacaaaaacataaacaggtttcaactatgaactgagcaaaaaaaaaaaaaaaaaaaaagtagcaaacaaatttcctagatgagaatctttaatcaccagaaaagtctgtttgagtttatgacacattttattcatatcaactccctgcaggtctttatatagaactaatacccaaaatagtttttactgataagaattgttatagtccatcctcagaagactttaaaatcagaagacataaaaatatcttgggaatattttaaaagaaaggccatgttatatctgattattccagtttcatgaatattttctaaccctacattagactgttaaattctcataatctgaagctaaatcactaggcttcactagaatgctctggacacataccacaaggtcatcttgatgttagtgtccattaaatatctagaacatcaacacttaattaatgatacataaagttgaaaggggctaacatgaacccagcatgtgctattactctacagaaaacaatgttctctaaaggtcctgggacaccgagaatctatatttaccgtatttcaaccactttttatacttcaacatcactgaaatagagatccatcttacaatcaatagcatcttaaacctgataagatacagttgatgcagaatgggatgagtaataattaatgtctttcccacctaccaccctgccaaaaaagatctaattcaattttttgctttttaaaatacatataattttgcagtttatgttgctcttttatgttttccagtcattctaaagcaaccgcacagttggactgttaggatccatatctttttgataaaggaataagagctgagtcaactttttcaatccagaatgcaaccaactcgagtatctctgtttatacaaagcaatactaatacaaataacccagaaaatatgtgtattgctatttttaacacttaaaccgaggaactatgatttactaaggctaatattaaaatgattttgcatttactaagcatgtatcgctttgcatggtggtgggctgtgaaaaagaaaggatgagggtacacgtataatgggcaactgcggcagtccccactcagataccgagacacagccacaaacaccaccacataaacagtggccacagacaaagctaatttatgaataatattatattctaagataaattaaaatggttaaaatgtctttccaactacagaaacttgaaaatttctgacttcattgtagttaattatgaaattttaagtataaaggtttttggatgggagataaagtataggtgtccttatttgtagtcaatttgacatttagttggccattaatatctggaattttttttaaataaggtatttcagaaatcaaactgtattagaattttctttacttattccaaagtttactagcagacttgaatttgctctaagccaaactgcaagagaataaattttataatattggtatttaatacttatgatagctagattgatctatctaaaaatagattttcttttaggttcctgaaacaactttttaactcacttgtttgtttttcaactagcccagagaatagatgtcacatatgattataagcatggttccattttcaaactgaggccccagaaactcagaataaaaagcatctttcccaaagtcaaatagcactgggaggcaccatgaagacactctgttagtggaccagtatttcatggatctcttaagaagggagactaacgaatgaatggaaggaaacattcaccaccacctccatcagcgaccccaagctcaacagctgatgctgcaaccaatactttagacaaaacaaaaaacaaggtaacaacagcaaaaaaaggaaaacatgaagctgtgatctcaggccccttatacaagttaactaagaagtttagaatccaagaaaactacggaacctaaagggaatttaaaacttaataggaaaaagcaaaataataaacacaggttaaaatgatttgtaagatacacttagaaaaacagagatctgagcatccccttttcccaaaataaaacaaaagataaaataactggatatccttcactacaatctgcttggcttggtgggatttatttgtttgaacagcagtgtggtactaagagtagctaagctgaaaacacataatacacttgttatgaagaagaacatttttaaagcaatgtgaagaattacatattctgtcagtgagaatcccctgtctgagggaagaggaggggcatcccctagcctcctcttctatgtcttcatgagggagagagcaaagacaggcaatgagtgagtgatatgtgcattctttgctcattttcggccttttcaatctgcttggtgatatgctaaataacatattaaacatgagaatataatgatacttcaattaggtaatgggaaaaaaactgattctgaggaattactttgtcatgaaaaaaattcatttaatgtcatttggcagccttctactatccctctctgtccccacttctgagctataacatcagaattgaaaactgctgccattttaagggaaagaaacacttcctctgaactttggagtatgaaaacactacatttgagagctcttcccctaagctgttgctgaatggcttgcttctctaatgtcagcaccctcacctgtgattggggatattgtctcctgcatcagagagtgtaaggattcttctgtgagatgatttgtgtaaaaggcctagcacaagatgtggaatcagcaaatggcatctttctccccactgtgcaatcatttcttatggtcactgcaatcccttggttaggaatattttcaagctgtcatttgtgagccttcttcagcatgagtccacgaggttgggacacaaactaaaataacctcacatgaaaataactaaaacagacagttggcaactggttaacacaagacatgatgcatccccactacatacatgaacttaggttaaattaaacggacagttggcaaccagttaccatgattctggtccatgcagttgatcagccactatatatgatgagcacatgctcaatttgtttttttctgctgacccaattggctgcttgatttcactactcaattgttttggcatgttgtacatatgagttaagtccaaatgggtaaggcttgctcaggatgacagaaataattatcctacaatctatttctaaaggcacactacatgaacgccataccattgtcacaccggaaatctagtaacatctctgcagctcaatagctttagtcagtcattttgttcctcaaatattcagcaacaaagtctcagccagcaccatgggacagagctgcttcaaaaacatgtctacacgctaagtaaagtaaaccagcacaaaataaatgttctatgattccacttacataaggtaggtagaataggcaaattcacagaggcagaatacagaatagaggctaccaggggtcaggatgagaggggaataaggaattgttgcttaaaggttacagactttccatttggagagttgaaaaagttctggaaagagacaggggtgatggttgcacaacactgtgaatgtaattaatgctactcagttgtaagcttaaaaacgtttagaatggcaaacttcatgttatgtatattttaccataagaaaacatgtctagagtcacagagaatatgtttaggagatggagcacattggaagttgcatgcacttgcaaattgttcttttcattacaattttcaggctaggtgcaatggcttatgcctataatcccagcattttgggaggccgaggcaggagggtcacttggggtcaggagttcaagactagtctggctaacatggtgaaacctcatctctactaaaaacacaaaaattagccgggcatggtggtgctcacctgtaatgccagctacttgggaggctgagcggggagaattgcttctgcccgggaggcagaggctgcagtgagctgagatcatgccactgtactccagcctgggcaacccagggagactccgtcgcaaaaagaaaaaaaaaaaaaaccccacagttttcagttaacaagactgtctctttagtcatcccatttgaacatcatgatcacctatgagatgcacaaggcaggtactggtacctctacttatttaaatgggtcaaaaccctgagcacctggggttttgcaatcaaaagccgaccttaggtatttcaactcttcctcaagtaagaataagtaagccacagaaagatgcaatcataaggttttcaaattggaacagctaaggactatttaataagggaggacgatgcctaaggtctgctaaattaggatgctcaggacagccagtggcagaggaaagaggctgcaagtggttactcacagagacatcagaggaaaaggaagaggtgccagcacttaaacacactttgaaaggtgaaatcaaaaataaatacgcagacacacaaccacaatctgtactttccaagcatctggccagacagagaacggctaaatcattacttccctgttttaaatatatatatgcctcaggctacaattgtggcacttttatggacttctccatacctttcttccaccttcaaaactgctcttttgaacttcagaccactggggtgttcaagaaagtatgaactatccactgaatcattccctttgtaattgccaaactcaagtgaagaatcacctaaaatggtttggcttaggggtaataaggaagaattatttcaataacaggaatcttttactcatgagttgagtctatttttgaaaaacccaacaagccacctttctcacctaaggtgagtagtactggatgcctcactctcttcttcctatattgaaagggttttagttcctccctcagattcactgttatatccccagcccatcgcaaagtgcctgattcttaatcaggactccaggaatgctggtggaaatatactgttgaattactgtttcaccttgcttagaacaaaaatgcattcttttttactttatacaggctgaactataaaaactgcatgcatctgttctatgacaactaccaacaaaataggcgcgcttatctccacactaaattacaatctagctatgcaatttaagtgaataatctggaatgtttaaggataatggctgtaggatgaatgccagggtccacattacatatccatgatagctgaaaagagctatcccagtgagattttccataatcacacaacatatcagaagcctaaatcaaatctcacccaaatctaaacaacagatatgagcccctgtttaaccgaaatgtgctgggcatcaatcaccaaattactctattcactgtttctagttcaaaatgttttggaactgccaagaacactgtaataataataaaactttacatactaataaaactatactttatgaaacatttttaaacttaattcattaagcacatcagagaattggttaactgagagtggtactcctcctgtcatgggacctttggcaacatctggagacattttggttgtcacaactgggggaaggggtatagtggcatgctagtggcatctagtgggtaatggacggggatgctgcaaggcacaggacagccccccaccacaaagaattatcctgctaaaaggttaaattcctgcattatagtaacagctacatacaaaatatatattatgctgaatgctgtggacacaaagatcaataagagatggcctctgttattgtggacagtccatctagtgatggaaactgacaggtaacaatgacaacaggctgagataagtgctgtgacagggttatttacaaaggctactaagagcagaagtagcaactacttcaaccaggaggttgaggcacttcactagcagtgtctttccagctggaatctgaaagataatttcatcaagtagaaaagaatagtgcattctagccaggtgaaatcatgcatgcaaaagcaagcaagtgtcaaactgaaggactctagagtcaccaggattgtgtgcaggggctttcaaagccagagattaacaaggtacatctccctaaagaaccaatctcatgtggagagaaggagattactaacttaacaggcaaaatgattttatgccattttaaaaatatttaaaacacaggggccaggagcagtggctcacgcctataatcccagcactttgggaggctgaggcagatggatcatgaggtcagaagatcgagaccatcctggctaacatggtgaaatcacgtctctactaaaaatacaaaaaaaaaatacccaggcgtggtggcacatgcctgtggtcccagctactcagaaggctgacgcgggagaatcgcttgaacagggaggcggcagttgcactgagctgagatcgtgccactacacttcagcctgggtgacagagcgaaattctgtcttaaaaacaaacaaacaaacaaacaaaaaacaacaaaacaggtatatggactagaatataaacttggcattaaattttaagataatacagaaggtggccttgttagatttttaatgccacactagttaggttgctcccactctcaagagatattttgagcaatggtaaacatttcaaaataattaatttcatgtgtttggaatatagaatgagtgcaggaagagggaagaaggtagctctagtgaaatataaggctgaacagtgtcatcttgatggtctttatgatatggagtccgtacttcctacagggtgggtagggggagtgactgaggaattataaacaaggaacacaggagaatcaggtggcaggagaaaagtcatgaggcaagaagacctgaaatattttagatgacagatgatgaaagaatgaacaaggcagtggcacaagggaaaaagattttagatggagaagtgatggaacccataggatcaaacagaagggtgagggagaagaaactgtttaggtcagacaactacgtgagcaaaccatgagagcagagagtggaaggggaaagaggtttttatgatagggttaaagatgatctcatttgaacgtcaagacaaccctccgaactatgtgaaacatgcaaatacaatgatgcccagcttatagaagagtttaacgaggccctgagaagtgaacagacttgcccaggatcacatatctggcataaaagaactgagattagaacccagggctcttggctcctgatctggattctcctcactcatgttgcctctctagtcatatctacaattataaccaaacatgattttcatgatacaacagtttggaccaaacttccacatgcctcagaagccctggataaatttctgaattggtaatatcaagttagaggtttgtacacttccacacaaagcccatttcgacttccatgtgaatgcaagagaaaattaattgtgaatgattgtgaaatttgggaaaaattattgacagcttttcctaacttgttctttgtccagttcctttgtatcaccagtataatcaaaatatgcattttataactttgtatgtaacaaggctttaacatctacatacatacctacaggtaggtattaaaatggcctccatgaaaagtcctaaacataaggtcagaataatgtccttttctatctagctgcctatacgtgaatgcatgccttcttgatttttttcgaggcaaaaatattaatagcatactttgcttcagaggatccaaattccaaaacaccctcaaaggcacacacacacacattcagttcacatcatatctcaataataatagctgatactgtttatggtgcatcattgcatgccaggcattaggccaagcattttatgtaatttccaatcatttaatcctctttatataactcagaaccattactactcagttttactaaccaaacaaggggggctcataaaggtaaggttatagaggcttgtcaaccaggacatgaatccagccctgattccaggatacatgctcttacccaatagccttcctatcttccagagactcccttaccctggaacaaagctcatggcacagcaaatttctgtaataggtttctcattattttcccttcaacttaacagacattgtcttaaatcatgtgtagcagctcacaccaggaaacagatttccattcaaagctttagatgatttgtcaacctgggttcatttctacagcagccccaatccaccataggaaaaatattatctcatcagtagaaaaaaatgagtcccagcccatgaacacaaatggaaaaggcagccctttcctccactgctcttcttttgatcctctcaatctcattttcatggtttgtattagtttatggtgcgttcactaaaaaacagagtatcacttttcctcatgatgcattttcttcttgtgaattcactacaaaacctctacaaatgtatatgatgtaaagatcatctctctacaccagacaggcaaaaggcccaataaatcatgcatagatggatttagcatggctgactcatccagctgaccaaataaaacaacaatctggtgcatccactttgaaacaggggggtggggagtagcatctcagcctgccacttagccagctagtatgcttaggcagtgaatgtaagtgcttctctaagctcctgtttcttgatctataaaatggagacactggtccctatctccgatgaaatatgtgagaagttaatgactgtatatgtaaaacgtctattttcttttcttttcttttttttttttttttttttagagacagggtctcgctatcttgctatgttgcccaggctggtctcgaactccaaggctcaaggaatcctctggcctcggcctcccaaagtgctaggattacaggtgtgagccaccatgcctggcccgtatacgtaaattgttttaatactctctccttacccagtctcaataaatgctaatttttttttttttaagaaccacccagggtctcactctgtcacccaggctagagtacagtggtgtgatcttggctgactgcaatctccacctcccagtctgaagcaatcctcccagctcagcctcctgagtagctgggactacaggcacatgtcaccacgcccagctaacttttgtattctttgtagagatggggtttcgccatgttacccaggctggtttcaaactcctgagctcaagcaatcagcctgcctcagcctcccaaagtgctgggactgcaggcatgagctaccccatgcccggttaataagctataacttctattctacaaccagaagcaacataatcttttacacctcaaatgcagtttaagtctataaataaaagacagagaagacagttgtttaagcagaaggaaccccctgatagagagtctaccaatggcttcttctgtttcccagacccccacctgaagatactgacctgggagagagggcattctttggctaatgtgctctggttcatctctttgagcagttcctttaaggcattgcggactgtggcatggttccactgctccgcaggcaagtcttccaactttgaacaactgcaaaacagagcaataatgaacaatacacaaacctcaaccagggtccctgactgaagaggagacactgcagcagccattcttgggtcttgtgggagcttcagaagaaatgctaaagaatggggtctaagtgaaggaagggaagtaaaactgcttctccaagactttgcgagggcccaaggggtctcttttgagtttgtcatcccactcatccaagaaaaatagtcatttgcaatacaagagatgctatttttataaaatatgatttttccaatgtgctggtggaaatggcatggcagtgtggttataaacttccccaatacaaatgtaattattgtgcatgcctaaggttaactgtaaacaaacatcccctgtcagatttgcagttggaaggcccaccctcaccctcatagaatggctcagagttactctctgaaccaaaaaatgacttttcagatcctcacccattcatagacacagatgggaatgctgggggtccatatttaaagtataaattgcccaaaaggggaaaattcaaaacacttacactaaaggacaacactccttaaatcacacctatcaggcactttacaataaaagactgcaaagaacctccagttctttagagagatatcttgttccagatgccatatttgaaaaaataaagaaatcatccccagaatctctgcaggccacaaagtgtgtttttgtttgtttgtttgtttgtttgttttgatgtggcccttggaaagggaagaaaaagatctcctatgtcaggacattcttggtaaacctcctacaagaacaaaactctcccctcataacacaaatgtgaaaacagcagaggtgtttattcttcaaatactatgtgctacacatttaagcaggcctagaggacccattgaataaggggctgtgtaaagctactcctaagggctatagatttttaatgatttgtcaagccgcccctaggttaccacttcactgcttctgaaaacaaagcataaagtagttggaatgtgactataaagacacctggggaagggccacccttctccttctctccttctttccctctctctccttcttttcattttgtccaatgtccagaaattaatagacaggacatgctgatctttgcagtgaatctatgattgacggagcagctctgacagtaaggaaaagcagatgttcagaaacacccacctttgtaattggattttcaacgtcacaacatgatagacatcttgtagcatgtcggccactgtcgcgtcgggtgcatctgtcacataactgagggggagagggttccaccttcccagcttgattattcctgcacagggaagaaaaacataataaacacatatctgctatttattaaaccttcccattgtttgttcaatgttaagaaggtcattcaatcatcaacatccaaggcccactcagatattttacaacccagtgcaataagctatttctttctggccgacaattgagttagttaactatacaggaagatgggaaggaaagaatgaggtttaatcacagacaatcagttcttttatgttttcctgtttcttaaattacttagaaaaccatacggatacttccttccccccagaattgtttcacattctaacttaaggctgatgctaaatatacaggactgctgatttcatagacaaaaaaaaaagtaagccttaagtaaatataagattcagttttgaattgtacaagaaaattcctgtgtgtgggctcagcacgcagttacatcctgactgtggtgcgattcccagtgcgaacagcatttggagctcatgaagcagttagagttcgctcccatatctgcgtttcagcaggcagtggggttgctttcccaggccaaatgcaataccacggtgattgaccacagatcagaaatagcaaagatgccctcaagttcctttcttttttttattcctcagctcttttgacagtgacaatagtactttttccctgtggatttcctgctgcatatggtaaacatgcataacaatgaaaaaataataaaaatcctttttaagcttgggctacgtagaacagcaattttaggaatacccttgttagaggaagattcatgggatggtttcagcaacatatggtgaaaatgctaacttattcataagataggcccattttatctggtacacagggcacacgtaacattgatgaagaaaaatagagaaacccatttcacatatgacacagggtaacaaaaattttatttgtaggcgatgaaaaatcccatgtctccaggatgtcagaaattgccacacataaaaagcagtgatgctttagtgataaaagaaaaacagcatttttatttttgacaatacaggtgagtccaactacactgttctttaaaaaaatatattatcatcaaagagagaaaacacctgtgcacccaagtgaacttttaagagcctcacaaaatgacagctatggggcaaaattccagcaataggaaatggactttctggtcagggcacgtcctgtccaagatgaaataaatgaatgcgcaatgcttgacataatgcttgaaaacagggaataaacagaacaaaaatattaaaatgatacactgtttcagtattaagatttaacaatctggtgctgaatatgctgcagtataaatagtgcctggactcagatccaataaagtaacacagctctcattcatagtaccgtatgtctccagttctggctccttaagtcatatttcacttgccaagaaaagctgttttcttgcggggatagttttcttaacattctctctcatgacaatgaaaagtgcacagcacacagcatgtagtagtcatgaaatgaacatccagggcccactggacagccacccacgagagagtgggtctgcttccttgcttcttttactcctgacatttgcaaatactaaaaagaaaccatgtaacatgtctaacatatttcctttttaaaaaatcattctacaattttaaattcctttcaaaagtcattaccatgatcacccataagttgaatataaattggctgtgttctaaagtcacacagataatatatgacagaatgggggggaatgaagttgacagttgtgcactatgataggcaagtaaaagaagcagattttgtgggtcattttggttactaagactaagcaagtaatataaaaaaaaggaccctacaagcttcaacgcacaactctacaagagattcattcaagctgttgtggtgtcagtagttgattcctttttattgtaaagaagcattccattgtaagaatacaccacactacagccagacacaacagaatatatctgtatgatttcatttatatgaaatacaagaacaggcaagactaatctaatggggatagaagtcagagggacagaaaggggcattacataggcagggacatatggggattttcttgtttggcatggtggttgcatggttatacaaattgtcaaaatttatcaaactgatcacttaatatgcatacatttttgtatgtaaattatacctcaattttttagagaggggagggagagaaatctctacaggaaataatagacaactcattctactggaaatagaatctccatataggtaaattcttaccccaccttgatgagccggaagaagacttgtttgggctggaattagacacacacaggtgttttaacaacacttaatacctccacatagagcagctgctacagtttggtttctatatcttggaagagagctgttggcacatgctattttcccaggcaatgggaagtgtgtgcttttccttttttgcaccttattaactaacttgcacagtcctagaagtcatggtctctgcacagctatttaccagggtctgcaggtacaagatctgctaggagagctatggccagaagcccactctactccagccaggtagaggcttggagtaactcttaatgagcctttcctccaaacagggtctctgtctaacgtactgtgttaatcctctttgcaaatacattctttagaacagtcctccttccctgatataaaatagacaaaaatattacttggaatagtagtcaagtgttaattgaggaaatcaaattgggaagcagtataccatagtgactaagaatgcaggcttccaagttaaattgcctctgttcacatcctggctctgtcacctactaattatgtaaccctaccaagttacttaaaattctccatacctcaatcctctcatctgtaaactggaacaataaaagtactgatcttacaagaatactgtgcagattaaatgtaaaaattattaaagagcatgaatataatttaatctcaaaaatttagtcattcttttgacctttttaatgtgtcttaaagagaagatatagtcagtttatttcaaaatacattgactcaaaagatttttgatgattatattagctttcagtcatgtgtctataaaagacttttgttttaaatcacaaaggaggagtatacatcaatgtgtcccatcttctattcccaccacttccccattcatttcttccatccttgctcctcagtggcgtctttcctttgacctgtaagtagattcagatctcccctacttttttgtttgtttgtttgtttgtttctgacacagggtctggctctgtcacccaagctgaagtgtactggtgagatctcagctcactgcaacctctgcctcccaggctcaagctagcctcccacatcagcctcccaagtagttgggactacaggtatatgccaccacacctggctaagttttgtatttttatagagacagggtttcaccatgttggccaggctggtctccaactcctgggctcaagcgatctatctgcccacctcagccttccaaagtgctgagattacaggcatgagccactgcacctagccctcccctactttaaaacaaacaaaaacactatgacaatctctctgttccctcagtctcttattttctgcaccaccaaatctagtataggtgtacctccaatttctccatcagttctttacccctgaatatctagtgtcaactccctccatgaggaaatggagattcagaagggatgggttatcttaagtagcctaggtaatattactagcaagtagcagagctcagattcacttcaaagaccaggctctcactcttcttgttatcacactggctcaagtgagaggcaaactagaagaaaagactggttccaagttttgggaggccgtgaatgcctgactcagtagcacactgtataggtcaaaggttaggagtaaggtctggagtcaaagatgagtttacacccagcctcctctgcttgtcacctgtgagactttgggcaaattgtttagtctttccatgtgtccatttccatatctgtaaaatggggatacgaacaatgcctaccctttagggttatcatgagactttacatgaaaaggagactctagcactgggactgctacataagtgctccataaaacttaagggacaatagatccttgtaagtttcttagtgtacacataacaacaataaagcaaaacttccagagattaatttatacaagttgagtattccttatccaaaatccttggagaaccagaagcaattcatatttctgattttttcagattttgagatagttgcattatacctaccaggtaggcatcccaaatccaaaaattcaaaatctgaaatgctcgaatgagcatttcctttgagcaccatgttgacactcaaaagatctcagattttggaacatttcagatttcagattttcagatttgagatgctcaaccggtactggactgcaggtggattaaaaacagcgctcattccaaggggagaaaaaagaaccgaaataattcaggtaggtatgtctagttacaattacaacagcctcttcctggcttctaaggagggatgcagaccacaccaatcactccagtgtagtgaacaaggacaaagaagcaagaacaagttatgtggccattgaggataatattgcagcactagagaaatgtcaataatgatggcataacttaagtatacagatgttattcccaacattcacattctataagttttgtaaccccaatttgaaaaatgagaaaaactagtgatgattaaattaggaaatatttcatacacgtgcgcaagcgcgcgcgcgcgcgcgcgcgcacacacacacacacacacacacacacacacacacacacacacacacacacctttgagttcagccaggaacatagtagatgctaaatgcatggcaatttccattttttctctgaaaatttatcacactctcactctgtctagagtactgatccccaatattcacttctagaaactgtctatattattgctgaaattctgccatgggaataattccaacccagataacccacctgaagtaatcctttctctataacacggtacaataaatattcttggttggtttgtataccttataaaaaacctacttattcacaatatccctttatgttactttacagtttgcacagtgttttatacaaccattagtttatccttatgaaaacagcctggactcagcattctacctggaagtaagctgaagatcaaagaatgacttttcaaggacataagtggatgaaaaccaggaataaaacctaggcttcattttgcaagtttttgaactactgggccaatatcctttctgctcagctctgctaccgatgccctgaggatgtacccacgtccaagcgcccaaccacacaaatgggcccctggagaggagggccagagcacgtccacagtcacacatcaggcagtgtctggacatttaatgttaaaccaaggaataaatgagaccaatgagcaaacaggtgacatcacagtcccagaagtctgaagagccagttaaacttgggacttctctggaaaaaacagtttcccacaacagtgccatttcagacataaacattgttttccaatcatctttattatttacaaggaatttgtcatctgcaaacatttataaaatgcttggtgttgaagactattacagatgctgttataaggtctttgagtcacaaattatgggcctttattttggggttgaaattcatacaaatgttaacatgattgaattgagcacagtatgaataaaaccgtctatatccagacaaatctgttcactaaaatatagagtaccaatctactcaatgtgtaatgtgtacagaccaaataacaaaatgcaattgtaggtaaatttcccattagtgatataaaattagattgggaatggaggcaatttttgtctaaaattaaaaagatgcaataatggaaaccagttttttattttctcaatgcagtattctgccagagttaaagagctgacatttcaccaaaagaaatatcaatagttgtttgtgttcatgtttttggtatttatctcaaagaaaacagttactattctcagtaaatgcataattcatatttttagtatcatttgcctctaattatataaaaacaaaagagtggtgataatacacattatagtcgatcaatatttgattcaagcctttagaaagtcaatcatgtctgaggataaaataaaatgtgataatacattataatcaatgagccattagaagtgtttgtattaagcatgaagcattcattcaacaacttttttcttgtgtccctccaacataagtcactaagatgcaaagataacctcaatatatactgtccctgtaattatggagctcacaattgagcagagaagcttattattgctaaacacatagctaagtgaaaccattcctaaaataagccaagatgatagcttttacccctgtaccttaaatatgagaaatatttacttcatgaaggcctacaacaggctgcctgtgaagtacatgagaacagttctcacagtttgcagtggcatgtagatagatgctgataaaatagatatatattgggtatactgcacaataaagcctacagttcaatctgtgaaacagatataagcaacccagcaagatatccagcagtattcttataattcagctggatggataattttcttttattccaggtgcattttaacattaatttttaaagcaaaatgaaaactcaacctgagaaaaaaaaatgagacattagctttaatatccaaaggctggggtttgtatatctcataactccctggaaaagatctccacaaaagagtgtcaataaaaaccccagccttagaagaactaagccttggggcttctggttctcggtattatttccacaataccaactgctgatgaggctccttgtaaaaataggagaactcatgacattgattgcatctgtttatcttcctcagagtggttgtgttcatatgctatagcatataattttctgttgttcagctatgctttgttaaagaaattaaaaactgtctatcctatataataagaacatagaattatttatccataaatcagttcacaggaaatcactacccagcagtatataataattcagcctgtgtttctaacctgtggcctgactgtggtatatcatcaaattgtagcagcaaaaagacataaattgtagttattattgctaaagctgtggtgggaatgacttttcaatgaggaaaaagaaaaaaaggtgaaacaaaaatggtttttgaagtatacatattttcctttttaatgcatagtttagcagtgccccagtacaacttgttggaataaacctaactcttctacaccttctgctttgattttaaggactctctctatatatatttcaactggcttgcattggggtaaaagtaagtggaaaatgaaacagcatttttgagtcatcttacattattcaagtgcctttataacttacacaaattaatgaaacctcacaacatacttgtctgggagcctacaatggatttaatcctgcatttatgacaatacaaaaggaaatgccaaacaaaaataaataattcaatgattcaaaataaacactgaacatatactgtcatatgaatttatctaaaaatcaagagatgcaagtgtgtgagcacacacacacacaatgcactgtttcccatccccacagataacttctctgtttgcaagaattcggtaacactgacaaacacaaacaaagtaggttttacctttaaaaatactaacctgtatatttaaatcatatttctatctttcagaggaaattatcaagaagattattatttaaaaattaaaattaattttagagtactttctgaataaactatagtgatacagctgtctgtcacactttttttttaagctgactacccccttacactacagaaacattctattttagaaatatatacagtaccatttggtgccttgtaattctatacatggcttttacaattttgcggcataaagattttgtctaatgtaatagatgctgcttcacatttgggaaatgttatgttacaaccctgacttttattagattatttaatataagcactaagtaactagactaaattaataaagaccttattgaaaaaaaaatggagagggagagaacaaaattattccacaaattaaataaaactttctgaagttagcatttcagaaatctttatttaattttcagaattccagttcttctgtaaaacagccaaaatattggtcaggatatgaaaaaaaatgtggttggtgtttagttatttatttcataaaagtgccatttaaaactattacatggaggaataagacaaatgagaaagaaaagtgtgatgagaaattatttggggttggttctaaacttctgtcactggttaaaaaccatttcatccagtacatattttcttattgttgttctaagtttaatcattttctaaaagagttttaaattaaaaaactcatggtggcaggtaatgcaaagaagcttcttttttcctcctttctattcggaaatacatttgcataaagagatttccccctagcatttgtccccctaaaatatcttcaataatcaaagacacaagcgaaagagtatactcttttaaacatactttgctacattctagcagatgctattcataacttatgtttagccagtgtttctgcatcctctacgatgaggtatccactgaaggtctaagaatacagttgcctcacatctttcacatcctcattaattatgtgtattcttttcaaatgttgcaataggttttcctgaggacctggctttccaggtactccatgtctaggttcaatatccctggaaactctctatcaattgcatgctcccagttatatattctagaattgtcctccaggcatattgtgtttcctacagtttacggttacataatacctaatcttaggggcaatattatgatggcatgtagattatcaaagaaaacgtcaccatatattaataatatgaaggcaaacgtatattcatttatgttgtacatttttattcatgttccaactaacctgatttcacagtaattcactaagaaactacaatacacagaagcaactacggctataactggtagaagtggcaactgcttttggtttgaagattttgggtttttgtttttgttccctttagaatattttaggccgggcgcggtggctcacgcctgtaatcccagcacttagggaggccgaggcgggtggatcacaagggacagagatcgagaacacgctgaaacctcatctctactaaaaatacaaaaaattagccaggtgtggtggtgggcgcctgtagtcccagctacttgggaggctgaggcaggagaatggcgtgaacccgggaggcagaggttgcagtgaccagagattgcgccactgcactccagcctgggcgacagagcaagactccgtctcaaaaaaaaaaaaaaaaaaaacaaaaaacaaaaaacgagtattttaatatattttactttcagtgttcatatacacatcagggacattttcatatatatgttattaaacctaatgcacacagcttcagatgttttacatttaaagatattctgacagttccttgatttacattttttggaaatgtcatatttaaaggctgtaaaccaaattttaaaatattccgctaccattttaatggccaaaaaagaagccaagagtccaatacacaggaggtgttctctcggtaagcaaatgtttctctaattgaatcaaaagtagacttacagtcacaacatacatggtgataaataatgacaatggcctatttgagccccaaaaaatattcagcaatgtcagaaaaaatgccatataaattaatgggcaatggaactgtggtagagttagaggctattccccttgcatgtctagttatcctgtggcagctggaccacacagttagagataatctggagggtagaagagatcacaaatgggttgtttttctctccattcccaggaatttgcagattactaagaactatggtgtttggagtggtcagattaagtaaatgggttccaagttcatctgtagagcagtcacgggcctcatcctggcctctgaaacaaaagctccaggggtagatcccaggagatgctggtgataagccagatttggacatcactgcccagcgtgcccagtaaaaagcaaggactgggagcatctagattaatccactaattctcctcaaaagagcagaaaaatcaaaattcccagattccttttttttttcccttcaattcactggcaaatctcattactgttgcagagaaagaggaacattgtaacatttaagtaggaaagtagggctaaggtgcactgtaactgtgttttatttccttctaagtgtgaaggacttggcataggctgaatagacaatacccaggaaaaaaaaaaatagtttcttgtgtattaataaacctgaagcttttttttaaaccatatttagactataaaccaccaaaaggcaaaggtcatgtcaatttaacttgttctaacaactctggctacagccccataaaatgaggatgcctaaaatacagtgggtgtgtgtatgtcacatacccacttttgtttgaagagcagcagcctggcaatcaagagatcccagatcttggatctgccctctgttggatgcagctctgcatctgtggataactcgcttaccctctctgggcccctattttctcttctataaaatggggagttaaaagctaaaacaagaaacaaactcccctgcctgactcacaagatggtaattacaataaaataacatgagttaaagtgcactgaaaattataaagtcctgtataaacatatgttggcattaatgaattgtaagtcaacataaaagaggtaagcattacattttttaggatgtttttaagggaaagttgcctttacttaaagaagcaaaaacttggatcttctaaaatgtcacctgctaacacggcaagtcatctgacatagtccaaaagaccctaggataggaaatttgtcctagcttactgactggggccacttattctctttgaacctccattttgccatctgtaggagtgtccgcaatcagagaaggcatcagggaccacccaccctctgctacaaatgatcccagagagcctctgcacttaaaaatatttggcacctttattcttcactagactgtaagttccacagataacacggtgcctggcagatggtagaggctcacagataaggaaagaagaaaaggagggaaggagggaatgaagctggaagggatgaaaggtcactgtgccgtggccagtgggcagtgccagctttctttgcaggttgaccttgtgctctcagacccttccccagcattctgccaacccccaacatatggaaaagtgagcgcccatactcttggtaccctggatatccaggaagactagcccaagagatgttctagacacctgataatggcacagagaagagcctcaatagctgaaaccctcaaccaaatcttgtggaatccactacagtcccagagacttactgataatctccatggccccttgcagttctgacattctagatcaaaatgatgccccaaaactttggagattaataatgatagctttgattactgtcattttaaaaacacactaaggcttcaaaactggaaataaagtcaacattgaattggttgattgatttttctgccattaaagttctacttttctttaaaaaaaaatggcaagcatccagctttttgtttctcaggaagggctcatttttaaaatttcaaagtatagtaaacaacttctaaattcaggataattgaaggtctgccagttggtgagcaaaacaacaatggctttcagatcaaccgaaaaaaaaatatggctcaatcaggtttttttaaactgaatatcatccagccgactgcacttcttcctaaaataacaaaagctgctgcctactgactactaatggacttctctatctaaataaatataattgtattcattagttctttatgttaaaattattaaagagtaactttccccaggacacttttatgttaatgaaagacaataacacaatcattaggacacgatactctcagatcaattttgcatttgcatagtacccaatagaatagtttatatacctgcacaaataagtaatcccctcttcttaaagatgtatttgtatatgaccaatgaagcccatagcataaaccacataaataaataaatttaatttgctcaggaagagtgatgctgaaaattgggagcaagatacaaaaatctcaaaattatctgattataaatactaataaataccctaggaatcactgatatatgaagaccctccacatgtcgacaagatttacttttattcagagctttaagatataaaacccggtaagaaagataagaagatggcaagaactgtatgagagctaatactgtagatttctattacattctattagaaaaaaggctgtgggccaggctctgtggctcatgcctgtaatcccaacactttgggaggctgaggtgggagaattgcttgagcccaggagttggaaaccaggctggacaacataaagagaagccctgtctctgcaaaaataaaaataaaaataaaaagccaggcgtggtggcacgtacctgcagtcccagctactcagggggctgacagagtgagaccctgcctctaaaataagtaaataaataaataaatatagacaaaagcctgcaaaggggtcccaagagctaatctgtcatatggattttttttaattcaaccatccttaaaataacttaagtggtgtttcattttgattctaatatatcaccatcaacttcccacctctaaaaggaaggaaaatcacaaatcaaaatatatttagtcactcaggccactaacttaaatgagaaaaaaaaagatccatttaatctcatttcatgttgttttattttgttttgctttcattattaacatacacattctataatacatggggagaaaagcatgaaaatattcactaggataagactgatttccttcatgtctaattttctttttttttttgagacggagtctcactctgtcgccatgtctaattttctgaatacagatgagcctttggatactgatgacaccttagtgggccccagtttacctctactcatttttaattggttcaatcgtgttttatcataaacaccttataataatccatcaagaaattgggcatttaagtttatcatggtattattatgttgctacactagaagaaagtagttgaccaagttacccaatattacattaaaattaatttgtaccagaaataaagggcaagtcattaatttttaaattctgataacagtttccagtatgagtcaaggtaagttaaatttttgttaagttaaaatgcccatgaacatttctttatcagtttgtggttcttgcacacttggacacatctcaaaactggtcataatcaaccagaaaccacctcattcatctaagctagcctggtgtctgacacttagtagacactcaaaaaaaaatgcttgtataataatattgaaacatgatgttctaagaactgtaagagtccaaaaatgattataaatttcttccccaatcacatctatgtgacagataattttagctttaactgatttgtactttgccaaataaaattaagaaataggaaacaaaagctttgcaattcttgcccttgctatcaaattacttgaagacacaaaatactgggttggggtagtatattcaataatgcttctaataaatcagaataaggcctttaaaaataaatattttattcatccataaaccacttaatgggaagcaaacccacgtaaaagactttcgtatgtattttgggtgtagctacttctctctctggtctgtccatgatgatgcagaatgtcaactgttaaatgtgtttcttactcctccatgggcaagaaataatttgggttacaaaatgacttcacatgaaacactgctcgtgctaaagctccagtgattttcaatatgggctaaattaggcaactgacaaagctgactttactttgtataagtctttaggcacccaaatctgcagatagggcccaatttgtctttttgaacttccagttgctgcttagttcatacaaacctctaattcttttcccacaaaatacaatcattggtaccaaaatattttcttaaaaatgtattctaatagagtcataagagatgcttgatagttccatatttattgtctccattatctttttggaagataattaatgcttcacccaggggcactcaaaatggctattggaattatccaaaaattcaattgcccagagtggatatccttatataaacattcattctggataatttaagatacttgttattacaagtgtaaggcctacagatgtgtttacaaaaatgagaataacattttgcatttggaatgtagaagaaaatgacctctcaaagtagcttcggtataaaaggaggtcacggtcccactggtctctaaaaaccacgatgtcctcagagaggagccaagtgaggatggaggaaatcataaatgctgagggtagtctgcctcaggtacacactgagaaactgctttaatgtaacctgacccacggttattagtgaaaatatcacttttgttgttaccttattcccaacaaattcatttctgctttaatggaaaagatccgggttcacactaatcaggcccaacggaaggccatattagcaatttggcaggtacccgagggccatacctaatctgcataaaatgaagcagattgcaaccgccctcatcttttttatttttaaactggtttttgaagcagagcataaaatctcagagggagagacagaagatgctagtgcatacattttccttcatgcctttattttcattctttttgcacaaaccatcttcctgaatggctgtttacctaaagaagaataacaaaataaaaggtgctaggaaatggagtaggcagagatcacaaatgtttaattaaaaaaaaaaaaagtcatgtactttcatagatattcacaatcctctctagtatactttcaaatcagttttaatttcagtttagtgtttttatgttttgtgaagatacgctacacagaaatataccttgaatttcggaaaaggctgcagctagcagagactccaaatctaataattattgttaaatctatgatatgcctaatagagaaaaatagtatattaaatatcaccattatcatctcaacactggcttctgctattcacagaataatttaaagtgacagtgctctttatatccaaagaatttataatcaaagtcattcagttcaagtatgagtgaatctgaaaaataactcaacaataatgaatagtaactaatataagccacacaaaatttgggaaaaaagaataaacacacaaagctaagtgtatcagataattttttaaaatagacttactataggtctagaagtcccaaaggaaaccatgatggaagaatttggctttttttgctttagaaagatatatgaaagatggctgggcgcgatggctcacgcctgtaatcccagtactttgggaggccgaggtgggcatttcacttgaggtcaggagttccagaccagcctggccaatatagtgaaaccctattactactaaaaatacggaaataagccaggcatggtggcgtgctgctggatttccagctactccggaggctgaggtgggaggatcccttaaatccaggaggcagggtttgctgctctccagcctaggcgacaaagagagactgtctcaaaaacaaacaaacaaacaaaacagaaagatatttgaaagacagtagtttagcagagtgctatgggacaaaagaatgttacaagtgaaatggttccaccttaaagaagttatattttaagtacatttcatttaccttgtcaggatgttagaattaacaacaagaaataaagagtgactagtggtttgtgggaagagggtaagaggatcctgaagttgcttctcagggcaatgagaagccaatgtagactattaacacatgattaagaaatactaatctatcaataaaaaaacagacacatgttttccagactagagaatctgggtcatagggaactgctgaataacctgggccacacaggaacgaaagactactgcagtagaaagaaaaaacaaaaagaggatgagcactggtaaccttggagaaaacaacagaatctgcagatgggcaaaacagaaaagcaggtagcagaatacatacccccaaaatatgctctttctcatattgattattttgagttgaagacaattgaaaagcagatacagatgcacacgttaataaacttctatttgttttcctcttgttaatctgtcttttgtcattcaatttatagggtcctgggtggagaatagctctagggggcagaagaaaacattaagtttttcctcccctacagtataaagttttgaattagaatcagatgaccaagtcacccacactcagtgcctctcgatctccttatctgtaaacaagatgatgatggcctccacctcaaagggtttttgaggacattaaattaggtaatatgaatttgggttctctataagttttaaacatttaaccaaatgtaaactactattattgttgatgttacaaagagtaaacacaataataaagagctaaaatgactgatttcttatttagaatcttagaagattcaccaggtttgacaagtgtggaaataaaaaaataaagactcacagaatgaagactactattttttctaacagtgggtaagagagtaactcctacgagctaagtaaatcttctaataaactgaatttgaagtggtgctgaacagccaatctttgaacttctaaagataaagatacaggtaagatttaggctgggcacagtagctcatgcctgtaatcccagcactttgggaggccaaggtgggcaggtcgcttaagctcacaaggtcaagaccagcctgagcaacatgacaaaatcccatctctacaaaaaaatataaacactagccaggaatggtggtgtgtacctatagtcccatctactcgggaggctgaggtgggagggtggcctgagcccgggaggcagaggttgcagtgggccaagatcctgccactgcactccagcctgggtgacagagccagaccttgtctcagaaaaataaaatttaatttaatttaatttaaaagattttacaaagtagaagaaattcatgtttgatcaggtaaagacatagaactatgaattcttgggagtgaaagccattttgtaatttcctagtgtggagagaagtgctttccaagtgactgcaaagaccctgcatttgtaagttcttgctgcatgccagaccctttatcattgtattaattttcacaaaaatcctacaatatatgtattagtctgtcctcacattgctacaaagaaatacctgagactgggtaatctataaagaaaaaagtttcattggctcacggttccacagactgtacaggaagaagcatgttgctggcatctgctcagcttctgggaaagcctcaggaaacttacattcatggggacggcaaaggaggagcgaggcagctcacatgatgggagcaggagcaagagaagcggagaggtgccacacactttcaaacaaccagatctcacggtaactcactcactcactcactattgagagaacagaagttggaaatccaccccaagatccaatcaccccctaccaggccccacctccaacattggggattatatctccatgtgagatttgggcagggacaacactgaaactacatcaatataaatattaatgtctccattttaggttagaatagatgacttgcctaaggttacaaggatgttaaatggcagacactgggatccaagtctgcctgactccaaaactcatattatcttcctcagaacaaggtacttcttatcctctggagaatgctgcttagcctttgagacccaactcaaacagtacttccagagggaatagcacttttcctattccctccaagagaattaatcgcaccacactttgtatttactcatgaggtgaaaaactatacaattcatgtgaaacctcctttccccattaaaatgcaggctactcaatagagctccatcttagacctccttgttgctctagcactgaacttagcacctggcataaaacagatatccaataaatatttggcaaatgaatacctagaatttaaagactccaaattgccaccaagtaatatgataccaattcttttatgctgttatttttattagccatgtgtatttattgagggccaactatgagccaggtggagttgcactaggtgttgtgccatcaacacatttatacattatgccatttaatcttcacattattcctttaaagtaagatccccattttagagatgaagcaaaaaccagaagcaaaaaaatgatgaaactatttgctatttgcacttacgtaataatggtaagacaatgattataatatcatgaatgaagagtctatttgtggcaaatacagagctaagatttaacatcctttaattttcacaacaaaccaatgaggtaggtgttatcatgacattttgcagatgagaacaccaggggacagtttttcgagattacacagctaacaggcaccgtaactatttaaattcatatttttgactccaaagcccacattctttccactataccaagatctcttctatattatgctgcttaagtctgtcttaaatacctgagaaatctccaattgattatttaacctacattggttatattttacaaatgagtcggtaagaattaaaaataacaggtgtggtaggcaaaaggaggtccagggatgtaggcctgactcaactaattcaatcaggtgtattttgttggacccaaaataccatatatatcttttgaacataaaaagctgtgccatgctaatattctctatcactaaactttctcattcattcattcaatatttctggagtgtttacccaggctagacatacaggatggtgaacaagatcgacatggtaactatactcatgaaacttaggtctacttagtctcaccaataagaaaatatataattaaaaatttaacaagtgctaggaatgaaaataataggatgaggctgggaacggtggctcacacctgtaataccagcactttgggaggccaaggcaggcggactacgaggtcaggaattcaagaccagcctggccaacatggtgaaacccagtgtctactaaaatacaaaaaaaaaaagattagccaggcgtggtggtgcgtgcctgtactcccagctactagggagcctgaggcaggagaattgcttgaacccgggaggcggaggttgcagtgagctgagacggcaccactgcactccgagcaagactctgtctcaaaaaaaaaaacaaaaagaaagaaagaaaataataggatgttatgagaaagaataatcaggtagtcagggaaaatggcccaagggattaaaaaataataaaataacctgccttgctaagagtggtaaaaagagggtgctaggcagaaatatgggggaaaaaaatgtgtgatggtcataaaaccaggaagtctgggcagggctgagaaattcaaagaggctggcagtaagcttggagagtaagtgttgcagatgcagatcagaagagattaggaagagctttgcagatcaccgcaagtatttgtatttcactctaaattaaacagaaaacccaggaagggttttaggcagataaatggcattatttagtttctgtatttaagtcatcatttaggttactgggggaggctgccctgaagtggatcagaagtaaaaggcagagataccagctaggaagctgttgcagtgagccaggtgagaagagagggccacctggaccaggtagaagcagtacaggtgaaaaaaatcagacacttccaaatcttcctcaagatttgatacattattggctgggcacggtggctcacacccgtaatcccagcactttgggaggccgaggcgggtggatcatgaggtcaagagattgagaccatcctggccaacatggtgaaaccccgtctctactaaaaatacaaaaattagccaggcgtagtggtgcgcacctgtagtcccagctactcaggacactgaggcaggagaatcacttgaacccggaaggtggaggttgcagtgagctgagatcacgccactgcactccagcctgggtgacagagcgagactccatctcaaaaaaaaagatttgatacattatctagccaggcatggtggcaggtacctgtagtctcagctacccgaaaggctgaggcaggagaatcgctgaacccaggaggtggaggttgcagtgagctgagatcgagatcgtagcactgcactccagcctaggcgagagagcaagactccgtttcaaaacaaaataaaatatttgatccattatcactgagatccttggcattaaaaaatcaattgcattgaagggaacatgaaagtttcaaaggtactaataatgttctctttcctaagcagagtggtaggtacaaaggtttttgttttattattctttaatactaaacatatacattatacattacttacattcttttgtaagcagaacatatttcataataagacatttaaaaatatcaatgctatgggttttaaatgacgaatatcttagaacactcagatctaacagtcttgtcatttcaggcaggctttataaatccctcagtttgacctttcaatcaggacaatgaagctcttcaccagctcaaattctaatgaaacaggtatattctaagtccaggttaactgtaataacaagaaaactaagttaaacttaaaatctgaaatttgacagtgttaacaccttaaatgtcagtgaagatcaatcatgaatttgtcaaccaggcatagaatgcagacttttaaaattattgtctattatcctagttaatgaatcaaaaacatagaatgacacccacaaatgtttattaaagagttattgataatatttttaaaattctaaacaacctgtgtaaaaccaacagaatggttctgtaaattatgttatactcacacaatcagccattacaaaaggattaaaaattaatgccatgacaaaatgattaatattgtaatattaagtgaaaaacttattgtattgtataatattgtatattgttgtataatattgtataatattgtaatattaagtgaaaaactaagatatatagatagccaattgcctataaggaaagaaagaaaagagactatgaggggcataaagcagattttaactttatcagcaaaattttcaaggtaagaaatatcttgggtcacaggtaacaccaagggggaattttattttatccttcacatcattttgtattttttatatttcctacaatgggtgtgtttattacttttaaatcgctgctctttccttgcaaataaagcaaagcaacctacatgcaaaaaggaagctatttgcattcagaaatctcagttttttaaataaattcttgactattttcggatgagaaaccctccaatttagaaatctttatatagaaacatgaacagttataatgttgcctaaaaggatattaagcaagaaagccttgatattcaaagtggctggattggaacaccaacaaattaaatcaatctggtcggttagcaaaaattaagtcctcttctattcaaccatctatttagcaaacatctacacagtgccttctgggatggcaggatatcaacctgacaaggaggacacagagaatcagaagtcaatctgtcaataaggtgtttattattcctggctggagaaagagtaggtaatgcaaagacaccaggaacaaatgagcaagtaaataatccacatgcagatgccaaagaagggcaaagcaagaggaaaggcctctaaacgctgtacggaggaacttcactggatgaggaagactctcagatacccaagatgactgccaaaggggacatgtagccaatgtctcctcagtgaaagcagtggtaacatcacgtcaagaaaagaggcaaggcctttcacatgaaagcagccatcatggcggccagcactcctgactcccgatgtggacctactcgctctcatttagcttaagttctctctgtagagtgcctaatgaatgattattatgttaacagatagaagaaaaaacataagtggcacctctaattgatataaccaataactctcagttaatgattacttactgtaattaaaatagtgcacattatttaaaagttttaacataccacggggaagaacaatacaagatataaaatggcacagtataattctgagtgcaaccatgcaaaaaaaagcatcatttaaatcagagattattcatttaccatatattcttagcataaggaaagtatattcatttaaaaagtatgaaccctatgagtattgctttaatgttatgtgtctttttagaagccaaaaataaacaacgtttataaaaacattgttttaaaccaaaggctgttaaaaaaagaaaaaaatcacacagatcacaaataagtaacaattttttaaaagcaattcaacattttaaatttttgcctccaaagtattatatcacattgatcagaataccagactaccctttttattttcctttctggttatgcccttaaaaacactgtgatgcttctaagagctttaaacttgtaaataacccctcccagaagcgcaaatctccatatcttaatatcatgaaagctggaactgtaaaataaaatctgttagcagctgaaatcttaatgaggttctacaaagaagaggcttttctgcaatgactcaatgcatggaaacagttgagtaattataaatgcatgggctgaatgtgagttggcaaatataataccacagaatgtacccagaactagggttgtcccagttcaaatgagactatattcctttaccagtacaggcaaacaactaacctgaaatgtctttggctaagagataggtgtgagcccataaaattatgtcccttgactcctcatttacatggtgacaatctgttctggcccaccagcagcctgttcaacaacaaagcacttcagaaagagctctgcataatattggtttcatcagacataatagaagccaatgacaaatggacttaagtggtggttctcaaaacttggggacatgagactcccccataaagaacttgagaaaaatgaagattctgggatctaccaccaggggacccaattcactaggtttatatgagcccaggaatctgcacttaaataagcaccctccagccaagcaggctgacccagggaaatacaagactagggtgtgtgccctggagggaaatagagaaaggctggagggcaaatgcaaatgatgggtggagaaaaggagctgcattttttgggagggtgtatggggagtactccaccactatcactttttcagggaaaaggaaagcagtttcctcaaaagtgttctctgaaccttcacacatataactgtaaacttagaacatgtcctagaaatatttcagtacaattattcatggtaaagaaatcaaactccacatgcttatttctggttatacatagttttttaaaagaaaaaaaaaagaaataaaaaagcttcagggccaaactctctcaaatccattcttatttagaaattccaaaaatttaggaatgcttgattatatgaatattgcatgggtcaaggtaagtggagtgggtcttcattcagtccatgggttctagactcacagattcaacaaccctggattaaaaattttaagtaaataataataatgcaacaatataaaatacaaataaaaatacagtataacacttacatagcatttacattgtattagatattataagcaatctagagatgattatttaaagtatacaggaggaggtgaggaggtaataggcaaacactatgcccttttatgtaagatggacttgagcatccttgatatgttgatattcaaatgagtcctggaaccaatccccctggacacaaaaggatgattctattattattattctctgcttaccatagataaaaaccaggcagagtctttataattaacacacctaaacatggtagaaagttaaaatggaaacactgtgaaaccttatagttttataattttgtttccacaatttttatttttccctaaatctattaaattccaagccctatatgttaatatgtttcatttttacaatgtgagataaaccacagtgaaatatctaactttgtgagaaagcccagtgaaatatcagcattttccacggataatctatcccactggaaaaacaggtttcaacagagccttctaagagctgcaggctgcccccatagtcatctggcttatagtactcatcatggaaggcataatataataaatacatttatgaaggtgaactatgctgggcttaaatcagaagaatagacttttgagagacatgaagccacaggtttctctgaggtaccaaagaccacttcttctgaaaggtacaataagggcattctgagaggacgtatgtattttatagtttaggaaatgacactgaaaagctgaaaaaaaaatgggtgtaattccatggatgaaatcatgttaggggagatgatttaaaagagttgtgaagctgtggaaatattcgtatgatcacaattatgaaaaagaagataggtgggcatcatcatgagaaataatagtaataagagtaacattcattgtgtacaatgtcacttatcattaaaataatatctcaattaatccttaaaactgccttaaagtaaggagggttcttatcttattttacacatgaagtatagaaaagttggctgggtgtggcggctcacacctgtaatcccagcatcttgggaggatgaggtgggcagatcacttgaggtcaggagttcaggaccaacctggccaacatggtgaaacctcatctctaccaaaaatacaaaaaaattatcaggaggctgaggtaggagaatcacttgaacccgggaggcagaggttgcagtgaactgaaatggcaccactgtgctccagcctgggtgacagagcaagactcttgtctcccaaaaaaaaaaaaaaaaaaaagagagagaagaaaagaaagaaacatagaaaagttaagtaactccctgaggtcagatgccctaataagaggtgaggccaggatctgaaagttatctcataatcttaattaagactaggtaactattgttgaaaatgaagcagagaaacaagtaggaatctctaagaatcttatcaaagaggttacagcccaggagatctaagataagtgaaacctctaactttgacaaagttattaagtgaagtcaggaactcaatgatgatctagaaaaacacaggacaactgctgtgggagatgatgtcatgtaaaactataaagaaagtggaggcaaaactacccaattacccacctatttccattttatctgctagaccaaaagaagtttcaaactggaaatgctagaacaatggctaagaaagccctgggagctaatatagaaaataaaatcataaaagaacatctggatgcagtaaatgagtataaacctactggcctagagattcacatcccagggtatgggaggaatgcatagaagcgatatctgatggtaaaaataaataaataaataaaatcatgaacaaacagaaattccagaacaagtaatattttcactcaaagttcaaaaattaaaaagtaaaaaagttcagtccacagatgtaatcccaaaccatgatcctgtccttttatcagacttataggaacagcaaaaatacgtgagaaagcctttcatgataaccttggacctgacagggtagttccatagtttgtgccttgttgaataactaatcttaaaattaatagcctgaaaggtggttttcagggttacacactgagtactatcgtgggccccgcctattcaacattttaccaatgatttgggtgaagacgcttataaaatctgtagattttgcaaggttaatatagttgataatatgatttagattcaaaaggatgggctataacacttgactatataaaacggaataagaatgtattaaattatttttaaaattatatatgtatacacataatttttgaccttgcataaatttatgtgaaataggaaacaaaaacaagacaaactattacattgaggtgacttaatataagccactattgtgaacatctgctaaaacaaactaatgcatttatagaaagtcaagaccacaatgaggtaatgagataagttcgtgtcagagggaccatgagcaaccagatacaagggggatatactagcttggtgcaaaagtaattgcgatttttgccattgaaagggtaaaaaccgcaattacttttgcaacaacttaatacaacatgaaaggagagaaaagagaccaaatgtatacaaagactcctgtggttgtttagtccacaaaaaaaaaaaaaaatagagtcttagggagggcatgatcttagtttccaaatatctgagttgtagaaaaagaactatatcaatatactttcaagatgatttcctttataatccctagaaatagtaaaacaagagcaaatggtgatgtctacagcctcaccaaaaagtgagctcctcatctctggaagtagctaagtgaaggctggatcaagctctaccagggaagtcatggaggagagcactgaacataatgagggagtgggaaaagatatattaattatgttttatggctctacgataatcccaacagccatctagtttttctctttttcacagacactcctatacactactcagctatgttattttaatggtgatctatacttcagtagacgggagggtatgatgatataaaacagaaattaaataataattagaaagctgaatttagatcatgtgcaaagctccaacattttcttttttcttttctttttttttttttttttttgagacggagtttcactcttgttgtgcaggctagagtacaatggcaccatctcagctcaccacaacctccgcctcccgggttcaagcaattctcctgcctcagccttcctgagtagctggaattacaggcatgtgccaccacgcccggctaattttgtatttttagtagagacagggtttctccatgtcggtcaggctggtcccgaactccggacctcaggtgatcctcccgccttggcctcccaaagtgctgggattacaggcgtaagccactgcgcccggccgcaaacctccaacattttctagagcaatacttggctgtaagatattgcatagttaatacgacttcactgaaggaatagctttttccatggacaagatggtgaattaacatttttatcatggctaaagtatactgcctactttatattttcaacgccttactttaaaaaaaaccaagacaagttttttttgtttttttttgtttttttttgttttctataccatggtgtcataacaccacttacaacaaatgccaagtctttctgaaggaggaatctttacttgaaatatgcaagcactatttagcattgttttgtttttaaagattggtcacagtgtgaatgcccttcctactgcaggggataatgttaagaaatttaacttgaaaagagtttccagctcatcttcacaatgtaatgatactcctgctaagtctggatttaattacaaatcaacaaagaatgaggaagggaggaagttcaacatggctccccatcactccatcactgccccccaccatcactgactttttttctttcttttggtctgtgtacatcacagcccagagtgattaataacctgtgcaaacagactattctagagatcacaaactgcctttttctgtgtgtgttagtttagtagttgaggctatttgagggatcttaaaagcactacagaataaaacctttgtttaaaggaatatcgggcacagattcttctctctgctcctcctcacagaaacttaagcagaactccttgaactctgacctgaaaggacgcttgggtcagccacatctaatcctagactctgagattagtttaatgatatttgaggcagctgggatgaacccagctaaattctgtgtgctaaattctgtggccacattgtaaaatgagtcattgttcctcggggagagtcttcttgtctcaattggtatttgagttaaactgatattactgatcacctattcctcagtacagataacttcacaattagaacaggagtacatttgtgcctcgttgatcagaactccatattttccagtatcatctgcaaaccttgcttcttcgcaaaaaattgaacaaagaatgctggcaattaatgtctttaccaatctccaatcttgaggtgagaccacaactctgaaatgttgccctcccagcgcacgctactataactttatggaatatttagattgcagttcaagaagaatgaatgctccattattttaacagtctgctcagggtggtcactctattttttaatgcaatgtactacacaggaatgacatcataagggtatcataaaagcaagtgttaaaacctatgatgaattttcctattataactaagcagctaatagtgtaaaagtagatcaaaacatacatttatggtctggtaagacatttacattcacctttgtaaatataaaaataaagttttttttaaaaccataaaattcccttctgcctcttacttgtaaagctccattagtgatcacagacacctggaatttttttttcctaattaaagaagcccaagtagtaattgctaatacatggcatttattaatcttgggtagtttctttcttatgataaggatctcatttggacaatactactatgtatcaaatacaaatcacactgaatcatttactctcctctgccacatacattccattttcattctctaacaaagcttcctttgccacctgtgacgggttctttccaagtcactatgtccagaaaaaagaaaaaaaaaaaaaattcacctctttgtcctcccactctcacttaaaacttaactccatccttacaagcagaatgtaccatccagaaactcgccaagtacatctatgcatgacgatcccccttaactttccttgcttatatctaccttcaaacaagaagtgaaaaagagggagagagtattaccactaaatgactattgctctatttattaacattttttcaacgaatactattttaatatgaatacctaccatgttctaggaactatgctatgaacattgtttggatgtcattttctcctcacaacattatgagggtagatgttatttttatttacagataaactgaagttcatggaggtcaacatacacacccaatgtcacaaaacaagcaagtgacagagtcaaggtataaatccctactgtgtgactccaaagctagtgctttcaccactataatggttatagtgcagtctggactgtatggcaagtcataggtgtggacaggactagttcctagactagaacaactcacagaacagggagaaaagagataagtaaacagataaatgataacccactgtgttaacaactgttacaaagataagtgttataggggcataaagaagaaagtaactaatgctatttggtgaacagtgggataaggggatgattctcccaggctgataacctcaattgtaattgaatcttaagtttctcaggtgaactgaagagggggaagcatttcagaaaacgcctaaggacagagattcaagaaaaaatatggggcatctgacaaactacagaaaattcagctctgaaggagggtggggagtgcgaggagtcacatggttgaagggaatgaaaaggaagaccagagcctgactgccaggcccaaaatctgatgaatagaaaagcactgttgactggggagtgtgaagctatttgaagcaaatgagagctagattgtaaggacacagtgatgcatacttggaaaatatttaacaaggaggatataaaatatggtggtagcctcagtcaggaagcaaatactaagaattcctggttttgtctgcagtagtcctgactgagcacttctgtattacaaacagaagaagccaatgaagagtgagaaatagaagatacaagaattctggggacaaatgatgaagcataaccccaaataaagctgagagagtcagcaatggaaggagcaaggagagaggctgcccttgggcaggggaaggaacccctcaccacacgcccctcctgaatgcacagcacacaaagactaaagcgtctgcttcagcatggcattactttgtcttctgtgctgttctttatttttcctatgtgtctttgtcttctctccccaactaggtaataagtcccccaaaggtagtggtcatattttctatttctttgtatctccctccatattaaaacaatgtggacacatatgaaccagtcttttatcacaatgatttgagaaggaaatcaggtaaaaaaaaaacaaaaaacaaaaaacaaacaaacaaaaaaacctccctaatggggacaagtcacagatgagaaataaaaactgtgtatcttcactttgtagggaacaaactgccccagatgaaactgtaaaatccatggagaatgtagctaactatttatcaggaaaggagtgtaataagttgtcacatcataaataatcctgttagagcaggggcttagggatgaatctgttatctcttatttcttttacagtaaataaatgcaagtactgtttagttggtaacagaaaacaccagtgccaaggaatattacagaattttttttagctaatatatttcaaattaatacatgaaatatgtttgctagttctttggttcctcaaattaggagaaaacattttttaataaaatgtatatcttctcataatctatatgtttatttttgtaacttactcagtgtttaatctgaaaatagtactccgaagcacatatgtaatcttttcttagcatcacagcttttggcttacaggctttgaagtccccaattttatagataagaaaactgaggttcaaagaagtagcttctctcaacacatgcatgtttaataatgatgccggagctaaagcctggttttcctaactcagtgtcccatattctttcattaaacaaacctaaaatggagactgctctctgagattattttctctgaatctaatcaggactccttgctggcactgttagctttctgcccctctgctctctgccttctctgatttcccatgatagattcacaaataagctgtggccaacagtgctccttacctacccaatgtccacttttcctactagagagtcgcttttttttttttttttctgagcagcattgtgtcaaataaaaaacttgatttcccaggctctctagtcctgagactgagataaagacaaagtcttaaggaaggctgtccattccagaataataaaggcagagcttcacgagaggcatttggccttctgctcttctttccctaccctcttcctgcctggaatctcaactgggtatctggagatccagcagccatttttcaatctaagagatgccagaagatagccagagcccaggtccctggcggcattgtgaagatgctgcactggacacctacacgagacaaataaaactcctgtttggttaagccgctgttgaagagtttctgctacatatagtcacttgcaatcttaaatgattaatacctaagctaacattttaataaggactgacatattcctaacatgtcactccactgactcaaaccctttcagtggtggtctcaagcaggagaccactaaataaaacattaactttttagtttggcatccaaggtactttacaatagattcaagttctgatacctcttaaacatatcctgcataccagccaagcagaattcactgccaactgtctgtctcaccttctctctgcccatcaaaatcttgcagtcttgtcaaggcccctctcacacatcacctccctcatccatctaaactgatccttccaatctgatgagatttctccctcttttgaattttcaaagcaattttgtcttcatgatagccacggtacttgtgtgctctcgtaggcaagggcaccttcaggtcagggatcttgttgtactggtacgggaactctcctctttccccatccaccccccaccagggcaatgcccaatacacagcagatgattaatagtcacttattaaattgaattaataaatacatacccctctcctaatgcatctctgactgatccggaaagagtccatgccagcactctaatgacttaggagggagcttgtgtgacagcaggagtgagctgagctgcagttcaaattgctgtattgttttgacaccagaacaagtgataatgggctgtgactcggtgtgtcaaagcgctcactcaagactccggtgccagcctttcctgcttgtcacgggccccagtctgcaaaagcctttcctttcgaagcaccatgtggcatcttcttcagaaaagcctatagctggtcactcttctccccaaggatcacaaacaaaacaacgactgggagcaaggtctcactgggatctgactgcaacacttgtccctccaggaatgatcactggcacgtggtaagagggggtgaatgggcagcaggctgtgacagagagccaggacaaggcaaaacggcagtcttcccataaagcaaaggccaccccacatgcagcactgaagaagcatgaagttcaggttgcaaaacatcggggaaaataaaagaaggaaaagtttatagaatgagtgcaacagagaatatgtaatttaaatacaacctaaaacacaaaacaacataagaatgagcaccacaattatgtgcgtattaaaatataggacctgaagcaagaaacgctctatccttcacagtacagacttataacacatacttcacatatgtgtgactacaagcccaaaaggaagaagttatcttcaggaagagaatagttgtaagcttgttatctgaccagtggccatggtctcaaagaaataaccattcaaaatgactaaaacaaagtaactgttgtacacaattaattgaaatggagaccaagtcataaattagtataaatctccaagaataaattgctaatcattagccatataaatcatttaaagtgctatatagtattgttttaacttattagctgctatgtataatatcatgtttaaaattgtattgctataagaagaatttaataccaatagtgcatcctggataaaacataactgagtttacattaagataacatatatggatatccaaattacattagaatactgcagatgagctatttaatttgatggaaaagtgaatacttcattcatcagaagtttgattaaataactaaatccctgatttatccaatgaggttgtgcctggtgagtgacccgtggcccatcacctctctaatgccttcccacaagggtctactgtggccacgcaaagctctacgattagaagctagatctggggcacctgcactgtgaccctcctggcccagcccttctctttcctggcatgatgctccaccctgctctccaagacttctgcgagtatcctccagggccagtaacactccatgtgagctgtccttctctgtaaggttgtcctcagccccaccaagcctgtgtgccaacttgtagcatcatcattgccctcactgccactgccactgccaagggccacagggtagagaggtggctgtcaaaggcataggcctcagcaggggtgagtacaaaggaaaggaaaagtagaactactggacccaagactcagcagaagttacattacattatttcgcacaaggactattatatttctattttagagtgttacagttatttccatacaggtgtggttctattataccaaaggaggttattttgtttatgatctagtggattatactttgtaggaaactgaatgaattttaaaaatatacaattttgaaaacattatgtacaaatctatgaatgggtaattatcaaacagactatccactaataattatatttgaccttgaggtacaccacacaatttttgatacagatttaccttcgtaattacacttttcttagagtattattggctttcagttggtaattctaatattaaaataaacacacaccaaaaacacaggaggaccacacatctactagttggcaggagagaggtcttcttcaaatgctatgtttaccacaggtaattcatgtttaattttctttaagaatagaatctgctcaaaaatcaggaagacaggaggggtttaaatactaacaaaagggagagaaacagtaaagtagaagactggagaggtgaagaaaaagtcaataaatcagaataaattaaactactacttttgaattcccctccatgtcatttcttactgccttgtttacaggctaatttcattatgctggaacacaactgactataacataacatgggccaagtgcggtgactcacacctgtaatcccagcactttgggaggctgaagcaggcggatcatgaggtcaggagatcgagaccatcctggctaacatggtgaaaccctatctctactaaaaatacaaaatattagccaggtatggtggcaggtgcctgtggtcccagctactccggaggctgaggcaggagaatggcgtgaacccgggaggcggagcttgcagtgagcggagatcacgccactgcactccggcctgggggacagagtgagactccgtctctcacacacacacacacacacacacacacacacacactcacaaaaaaaaataaataaaataacatgacctgctgtctttaggtgtgctgtgcgcttaaatcatataaatatcaccatttactttttttttttaagccatgatcatttaggccaggtaaaagtgcaccaaaataatataattcggcatgaagctacctcctgtgaaatgctctaggagagaggataaaaaggaaccatgattcaagggtgacaagttcagttctcattacattcaaattttccagcatacaaatacctactgacaacgcatccccagaggaaatcatttacatcccttctgctccacatagtcccagatgtgctttgaggcagttccacaagtggaaccacttgagaagaagagaaaagatatgagcaactatttcagaggaggaatggaagggaaaatcatctgtcttctcaacacgactgtgggaagagttggattaaataaaatggcttcactgtagtcaagctgcatttgtactgaggtaactcaatatttagaactttaagaagaaaaaccaaggaacagaaaaaaaatttgtcccaagactataactcactaattacaaagctatcagtgaatatttaaagtttcatttgtcattagttaaggatatttcattgtttaaaatacacaattttaaccagatgatgggggtggaagttttattatattgtcagcctgtgtaaatatttaagtactctgaagaaaaggggaaagaagcaatgtagtgcagaacaacttatccacaaaaaagaaaataacattcttctaagttgatgcagtcatggaataggatattgtcaatttaaaaacatgaataccagaagacctagtctacctataccttaagaaaatttaagattggtacttcacatccagtatctcagaataagggctcatatgaattgaagctacagaaaacaaaagaaattgacacactgtatctggcttctgcattgtaaagtaataataacaacaactggaatcataatagcaactaacatgattcagcccttaccctgtgtcaagggcaatgtaaagcactttatttggattgtttcatttaatcttcctaacaaccctacaagggggaattataattactaccctgatttcatagaagaggaaactgaggcagagaatcgcagagctgggaagtggggagcaccaagatgaaaggcccggcagtcagagtccacaacgcctaaccactgcactatactacaatgccctcagtcagaaccagattgtaaaagacacagaactagagggccaacgatctgttaagtgagcgaagtcatcgtgatcaattgcttatccacttcttaggggaaagaaactagtcaatcaatttgttcttcaccatctacgtttcactatattcaaaattaaaaggaaattattttaaaaactaatataaaatgtgaaattttttcacattttattagtttattagttttattttaaaaactaatgtaaaatgtgaatttattttcaaatcttaacgtggtttgcttctacatccaaacatttttgaacaattcgatttgtttgatttggtttagtaaattttaactcttattaaataaacactttcagtcaatgttttgttacacgtaatagaaaatgtacccaaaaagaaagcattacataaagcatctaatacaagtcttagttatatagaataatgccccctgtgtgtgagaattcatcaggctggaatcagatgcaaaagagactatgatctgctgtacggagttccttttttccctctttgacccaaagatctggtctccactcccattcctgcccactcattacaaatcaaatgtcatcgatcccaaaaggcatcgagtgagtgattctgggcagctcagtgagaaacccatcactgcagagcaaaaccaacacgatacagtgccactggtaatcgacccacatcagctctctcccacacagacaaccatgctctcgttttcccagaatcaccagtactacaaacagaactattttggttccacacatttcaaagcccttttaaaattcaagacaaacaaatgactgtggcagcttagggacacaggtcctttgagaagtgcttcaactcacaacatccagattttgagtcttcaccttccaccaccacagaggcctagaacacactgtttttaggccagtgggaagtaaaaagaatccttagtcagttttactatgaatatattacccttcagcagaagtcaacacatatcttccaggaaactattaaacgcactaagagagagaattttctaaatggcacccccagtgccctgaaaataatccattctccccacagaataaaacaacttatttctaaggagtaagtttatgctaaagatggtcaattagaaagatgtacctgcattccatgactttagaagttcaaccttggctttcttgacagcatgttttttaaaaattttagcatgggttataaattacctcgggatgtccatgtgaaagcagtgccgcctgggaacggttcctgtcatcttgtagcatactcagctgctccctccgcacaaatggcacttgtaatgaaaacaccgccatatatcttgatttgtcagagaacaaatcagttttatctgttcattttgtggtttcatgtcataggtatttcagaaaacataatttataattcctcatgcaattatatatgaaattaaatcatctcacttttccagaagcatcaaagtatttcagattaagtagaatgcatttgtaatgtctttgaagttctcttcctctctcccttcctcccaatccaccccctgaagaaaaaaataaataaaggaaaagagagagaaatatttagcattttaatgagttaatctagttatattaggtcaggacttacagggacttttattcgtattcttaatgataacccactattacaataatgtcttaatcatgccctagagaggcagaggggtgtggtggctaagccactgtctcaagaaacagaatgcctgggtttgaacatttaggtcctggctccatcacttacttgctgtgtaccctggggtatgtcacttagcccatctgtgcctcagtttcctcagctgttaaatgaagataattatgcttatgccacacgaggtttgcgaacattaaatgatttaagatgtgtaacacacttagaacagtgcctcacacatagtaagctctatgtttcctagcattatcattagcaacaatacccataccactccttttttcttgtttttaggactaaatggacataagaatctagtgagactatgtcttaaggcattccaataggagatgagaaaaaaacatcctactggtgggtgcttgtttggatgaaaaattggttattttagggaactccaagacaatgtggccagcatcccttattgagtactaagtgacacctcagtctcctggtagaatgtgccaccccaaatgttttaatcccctgatttacagcagggttgggcctattccttttaatttacatggttaaattaatatctgccaagagactcagacaaattcataatcttgtcattagccacaacaggaaattcctccttaataagatggaaaagcaactgatgatcttaattgcattagtttgaagtgcaaatgggtgcattttaatatctagtgggggtcacatgtaaaaaaggaacatagcaaattataatgtaatatgttaaatcgatatctcatttgtatacttattgtatacttatttaattatgaaacattggtttcataactaatatttctttcacataaattgatatttttggttacatgaatatattttaatagataatttgagttctataaatgctagccaattatatctattatgaaaacccaggcaaatacttactgaaaacaaatactcctctctatcttgggactaccaacatactcacataggaagagaacgatcccagtatctgaggataggcctcagtatgagccgcatgactccagaaatacactcagaagggagacaatcagaatggagccaatgacactattagaaaaagttcagagtaggtactcaaataggttccaggtaggaccatctcatacttggtatgctataagaaagactatgaaaagaagctgggtcacgttagaattatacaatacagaagggagacagagagatgcttatctcttttccatgcccagcaggacctgaggtcccatagaaacaaacaaacaaaaaggattacaacccatcactccagcaaatatgggagatttcatgatttgttcgacaaattccctacctccaataatgggctgttctcaagcaattcaaacatagaaaaaaaccttccttcagagtttcccccaaagactccttcataaaatctccatcctactgcacacagcaaaaaacagaggctaacaaatggacaaactgtcatcagttgttaattcctgggcaaagaaacatcttaacacaggactgtcatcgtgaaactagtaagcagtcagtaaccaacccgcacaatactgcgtgtatgttttgtaaagaggaaaatgaacaaaatgtgggtaagaacaagacaattacaaaaacaaaatatgaaatcaattagctaaagtttcctgacacaatgtctttatagccttcttccacattaaaaacaaacgcttaactccttaccacagacaaaggtaagaaagcaagccaaatgaacattaatgtcaaaaaagtttttgtaaaaaaatctggccttgcacctgcaatgaacaatgaaaataaatttattttcaaagaacaactgtatctgcacataaatgttgacgtaaattactctgattgcccagcatgtgctgggtatatagtatctgcacttaacacttcctaatttactgaccattcctaaatccttccattaatagataatcaagagaaaactaatgtttctcatttgatttgaaaatccaaagcttcacggttacgtagtattaaaattaataatatagactatggaagttatacattataatgttaagtaagaactagaagtgaaaatattgcatacatctgacctccactacgtaaaagtatgcatagaactataaccaaagggaagcaacccaaatattacctatttttatctctagaatggttggttcatgagggaattttgtcttctacttttaaaaatttttagtttttttttttgtaattaacaagtattatactttataattagaaaaaacaaatttaaactttataagtttataaggagcttatatatacaaatatacaaaaatagggtctaacaaaacaggctcttataaaatgccatccatgatagcaagttcaattttgtcatttaagctcaaaacaagctccccactcaattttaaaatacatatcttcattaagttatcaatttgaaaatgtcaaccttcggtttatgcctgtaaggtataattactattcacttggattctagactcaattgacagattagaaatacagtgccactaaatgggatattggttaagtacacattttctgaagccaatttttggtgttggtcaagctatttgcctctctgagcctcagcctcttcattggtaaaatatggacaataatattacgtacttcacagggttattatgagcttgaatgagttagtaaatgttaagccctaggacagtgcctggtatataagaagcactcaataaatattaacaaattttattatagccataatatgtctattatgtaaaagcttcaatttccctcacaaaagcaaaaccatgacttaatataagctaattgtaacaatgttacatttatcctattccaaacatgagttagtccatgtaagtaaatttttcagataattcagacagctgaaccttaaccttttaagtgtccaatcattttagttttaatcctcaaaacatattcaaaacctgtcattttgttctggttaagcagcttctttccagaagtctatatttgccaaaaccctagttctagacgaaatggagagaagaggatcaaaataagcataatataatgttaggtcctacctaacattttattacatattgagttgcttattttccatctcccctacatataagaatgtaagtatcttgagggcagagacattatgtatttggttctttgctgtgtctcaacacctagaacaacatctaacacataatagacacttgaaaaatatttgttaaatgagtgaataaaatatgatgctagagaaccacagcctccaggtgtgctcttttaaagtttcttagctttcctttctgcaaagtaagagtggtaaaattcaaccacctatctttcaatagtgctcaaaagactaaagatcttaattttaaaatctttaaagaaagatatatcagaagtgcatggaaaaatgtatgcatggaaagatttttttcatgcacttctgatatatctttcattgcagattatctaacataggccccctttaaagaagtctcttcacccccttaaggaatcaccgtattcatagtaataaaacaagacatttagaattgctatttattaccatggctctggagcatagattctcaagaagaaccaccatttgaagttggtgaggctggtgagggctttcaatcaagaacaggctgccctcttagctcagctcccatgatggtaggcttttaccagggagattattagacctgagcagccaaatcattgaaggccaaggttttaaatgttctaggagattttcagcatcctattctctgatttataaaactgacagaaagagtatcttggaagcatctctctgctgagcgcaacctggaagctgagggggacctctgcgctgtctgatttgcatatagcccacagcgatcttttccaacttgagtaacaagcttgtaaaatagtagcacagatttgctgttctgtcctgagtgatatttcttcaaaccaaaaagaggcagacagatagaggaagaacctttgtgttttctctcattgacatacaaataattttgccaaatactgcttttgagcaagcaagtggcacgtgctctacagccttgacttaagaccctttacagctctcaaagctgccatcaaaagaaacctgcatttcaaagtgctgggttttaaatgctcatcacagtcacgcaaaatctatctggcacctaggaaaccaacctaaggtgcccaactgtgaccaaacagccagcagaatgctcacttttcactcctgcctctcaaaaccaccaccgagctcttcttctgtcatactgtaaacaaaggaagtccccgacagctctgggtcccacttatatgctaagctatttgaactaagtaataaataaattgaacacttaatactacagaaataaatgaatagttatggaactgggatcccataggaatgtaaaaatataataacactgtatcaaagaaaatctggacaaagtattaaaatgtaaaatatatactaacatatgaagtgaaagacctacaattctgaaatttcacaattttgcaaataactgaaattataagattcagatgatgagaaatcttttccaaaggaaaaaaagacaaaataggaagcagggaatttcttaaaaagcattttaatattacaaaatgctctatggccaagacttttttactgtccattatgaatgccaaaatagactttacttagagttggaaaataatggtatagcatcaaaactaggagttatatcaatggacaagtttaaatgtaaagaatatatcaaaaaagtaacagcactattgaaaaatttaagtgctttaacgaatgtgttttttaccaaatgagttccttgaatgaaatctgtactacatcttcttaaaccacaaacaaacctagctattcagcaaacaactctattttacatttaaaatctataagttagtaaaagacagttatgctttaaaggggagcagaacaaaaaattaaacatgatatatatcatatcagagtaccacaaattttaggcttgtaggtttcacacttgaaactcctagaagttatatattttaatgagacataccttaattattaaataaaggttgtatatatctgtaggtcagtctgtttaacctggatcattttacgtgaatgtctcagatgaccagtcccttccaggtcatgggcattaatgcctaagctctggagaagaaggactttaggcagtttaaaaaatatatcaaagttaattgctaccatggcctatcatcccaagcaaaacagataactgaaaacactgctaaatactttcctcatcatggaggaaataataagctacatttttaaatgaattatttccactgataggactttttttagtgggcattcaagtagaaaattcaaggtcagaggtaaagtgagatcgcacattcatttcttgccctcaacagcttttacccccaagcactacctagtcaactgctaggtatcccgaaaatcaagttagagtcttcaccctctacaaattaacatataaacaatatttccatcagctgaccttcatgtgagccataattatatatctatatatgttaaatacatatttatgccaacataaacaaatataaggaatacagaactataaatattatattagatattcaatcttaactatgtattgggatgaggaaataaggtgagcattattttaccgctggcatttaattagtatttcaggtttcactgtgtgcatatgaacatgcatatgtgcacacacacatatgtatgaatatttaattttatatagcagaggaggacaaagcatggggtctgttgaagaattgtgttctccaaatagtgttttacattgcggcctatccagctctaatgagggctgagacatggttaacagcaatttggggtagcattttcagctctctttagagagccacagaattttttaaaaagcagcgtgtctgttaaaagttagctctaaggcctaaaatgtctaaatacgtatattttttcaacattgcccttacaaagaaaaaactgctgaaagtctcccaaacatttagtgtttaaagaagaaaaagtagagaaaagagagagagtgaaaggaagaaatagagaaagcaagacaagattaaaccattttaaaagctttcttcttttttatttatttatttatttttgagatgcagtcttgctctgttgcccagactacagtgcagtggcacaatctcagctcactataacctcctcctcccgggttcaagtgattctcctgcctcagcctccacagtagctgggattacaggtgtgcgccactgtgcctggctaatttttgtatttttagtagagacggggtttggccatctggtcatgttggccaggctggtctcaaactcctgagctcaggtgctccacccgccttggcctcccaaagtgctgggattacaagtgtcagccaccacgcctgaaccattttaaacattttcaatagggaaaatgtcaaactttcagagcatgaaaaaccttttgactccagacaacatatatcttttaaccattctctctcaaaaaaaaaaaaaaaaaaagaaaagaaaagaaaaagaaagaaagaaaaagaaaaaaaggtgaatttctgaattcctttccaaaattatgactgcacttactaattatctgactgtccatctatttatttatttagagacagagtctttatttagagacatctatttatttagagacatctatctatttatttagagacagagtctttctctgtcgcccaggatggagtgcagtggcactatcacaatcttggctcactgcaacctccacctcctgggttcaagtgattctcctgcctcagcctcccgcatagctggaattgattataggcacctgccaccatgcctggctaatttttgtatttttagtagagacggggttttgccatgttcaccagactggtctcaaacccctgacctcaagggatctgcccacctcagcctcccaaactgctgggattacaggaatgagtcatcgtgcacagccactaattgtttatttaaaatcatagtatttgaaggaatttataggactaggattttcattaagtttagcaaacaaaaattctgaattaaagcagcaaacctaagtttcagaaaagaatttttttaagtgtgaaagaatagataacccatagattcaaaaaaaaaattaagggacacatcaaccaagtgcaatttatagatttgtatggctcctaatttgaataaggcaacactaaaaaaaaaattacaaaatgattaagaaaatttgaatctttactgaatgtgaaattaaagaattatctttttttaggagttatgacagtattgtggtttatgttttctaagatagtctttatcttttagagatatttattaaaatattatggataaaatataatatctaagatatactttgaaataatccagtgggggagggggtgagaagtgggtagggaaagagacgagacaggattggccatgaatttctaattgttgatcctagatgaggagttcatgaatatttaatacacaagtctctcgaatttgtatatgttgcatgtttccataaaaaatgattttagagaatttaagagcagagcatttcaaacactgaacaatttaaactgaaagaatattcatttctaacaataaaattgtccttgaaagtagcctctatgtaaagatcttcccaatagtacattgtaaagagatagtacattgaaaaatatataataaatgaataataaagtgataataataaaggcattcattttttataaaaatatccttggtattttggtttcaaatcttttttatttttgtcattgtttccagttcatagatggaaattctgctttctacataacaatgccttcaagcagatgaggttcagatcaacactgacaaaacatttgtaagtttgataagaaacttctagattaggaatatgttctatttttgtatcaggactcattttggtcacataagcaagaattatgtatttgaaatgctcaacctactataggccctctacaagtatttagttttagaagttggcttcagtacatgacaattccatgaggtttggctttttgtttgcttttaaattttaatgaagtctgtctctgttacttcaaaaaagtatctatatatttcatcaaagaaatgaaatatataaacatcattatcaaatatatataatcagcatgtatttagtaaccacctaatccaaaaagtcctaccttttagggcttatgtccaaaagtaaagagcaagtgctggcaatcaaactgttcacaggacggctgtgtggttaaggaccttgactctagagatagatcaatggacttcagatttcagctcttccacccactagcctgcgcctctgggaaaattactcccctacctttctttgcctcagtttcctcttctgtgaaacgggaaatgtataacttacttcaaaagtctgttatgagaattaaatgagttagtacatgtaaatctcttagaatagtgctcaacatatagtaattgctcagttgttaccatgcattatattaaagctctaagaattgcctgggtatagtggctcacacctttaatcccaccactttgggaggctgaagcaggagaatcacctgaggcaacataaggatacttcgtctctacaaaaaataaagtaaaaattaggctgggcatggtggcatggccacccagctactcaggaggctgaggcaggaagattgcttgaacccaaaagttcaaggctgcagtaagctatgattgtgccaatgcactgcagcctgggatacacatcaagactctgtctcaaaaaaaaaaaaaaaaaagaaagaaagaaagaaaaaaaccaactctaagaaatcccttggtttatacattacaggggctcattaacgatttattgattctttttttaatcttccactgaaaaaacagaaatacatctgtatcatgtataaattttcacatttgtggataaattagggatgaagtgaacagcttatcaaaattggggaataagacataattatcttcccatttattcaaagaattcatgaaggaagtaaaatttgatatttactttttttattagaaaaagaagaaaatcccacataatcccatcacctactctgctgattattctaatacattgccttcatccttcttccatgcatatatgtggaattttatatcactgagaatgtacttggcaccctgcttgattcacataacatttattaaagacaccttttctgtgttttagaaacattatttaaatgactgcatgaatgtaattactccaatataaataagaaacagtgacaattaatataccccttcttaaacatataattttgaccttaaaaaaaatccagtcagaaaggatttttgcttatttgctaagcacgtttgttttaaaataaaattgtcggccaggcacggaggctcacgcctgtaatcccaacactttgggaggccgaggtgggcggatcacctgaggtcaggagttcaagaccagcctggccaacatggtgaaaccccatctttactaaaaatacaaaaattagccaggcttggtggcaggcgcctgtaatcccagctatttgggagcctaaggcaggagaatcgcctgaaaccggcaggcagaggttgcagtgagccaagatcgtgcccctgcactccagcctgggtgacagagcgagactccgtctcgaaataaattaattaattaaattaatcaacagtcaattttaaaatttattttaaaattaacagaaagtaggggagagataaaatgcccacttacaaattaaatcaaacaagcacagtgaggcattaccttgccatcacggctgcctcccaaagcccaccattcacactgccaatatgaatgaatagctactcaaccagtggactccagaaatctctggacagtgtggggagctccatggctactgccaaaagccttatggggaagaactgaaaggatgaaaaggaaagaagaaagaatagtaaaggaagtggtgagttttaagttgggagagtggggcagttcccagaatagcagcagtaccctggattaacatgcctctttcaaaagactttcaatgcagagacgtgtactcacggcccatcatacatatagtataaagtatgcttgccattcattagacctcagtccagctattctggtagaagcaaagggcctgccagctttcggctttctacatatgcaaaacagcaagtctgatgaatcctgcatttcatatccttgagaatcagagttaacagaatgtgtgttgggaaatggaggttatgggtcagctagaaacacagttaccatggtttatgacagtatcttttacactattctctcttaggtactaatatctagccttcaaataaaggttattttaacacagggaaagaaatccctaaactccattttagtagaatttctatcattctttaggaggaaatattctttcttaataaaaattcaactcacctggagggaataccctctgagaaaaagaaactgactatcctatgttcacaagatcatggacctgctgccctgtcattgggacttgaggactattccaaataatgacattgctaacgtatctcctcctttacaggcaatctgaaatactcttccaactcaattactgacactcttttctggtcacatcaaaatgaaaaatcatatttcaagagtcttgatttttaagatggctaaagcaacccactatccttgcagtttagttctgcccaacttttccagcataggaaaaagagattcaagaatactgccatttctctgctttaaatggatttgccaggaagtccctcaagtcctcatcttggaggaattacataaacatgaaacaatcaacaaagtcaaacaaaaatgaacaaaaaactacccccataaaacttcatgccttcagtcatcaaaagtcatattttgttctacctccttttctatctttttcacacgctgctgtttatccagcatatgaattacctgtcttatcatgcatactatttggtctacaataaacacgcagcaaacagcatacttttaatgatctgaatgaagacaatgatctaatatatttatttcaaagtaaacaattctaagtttttccatttccccaaaacacagatcagcagcctaatttaaaacaaactgatttttttctttgtgagattacagtacgagactgagtgataaaatctttgcttacctataaaataaagtatatctgtactctagagcaccttaagaatattgattcaacttataaatagtagaatatttagcattttagccttaatattcaaaaactttgaggacgcaaataatcacttttgacttgttccctgtttaataatcctccactgtagatgacatttatttgctcatatatctcaccttggtgagtagaattcttagtccaaatccctgaaaggaatagtgtggctccctagtgcaaatttcctgagagccccttccctcagtatgtgccaagaatcaaatcttggccacttagtgctctgtgttccacatgtgagctcgcgacgcgctgaacggctgtgctaactgagatggatggccctgtcaaacaggaagctggcacaccagggtgcaagcagtgggatacaatgacctttacattcagagaaaaatatccctaaagtggcatgaaaagtttgtggggggaagggaagggagattcttttatttcatttaagtacatagcatgacataaaagcaatggtgcccagtatgcaatttgctcaggatcaaatcgtgaatccctcacacaagaaggaaagtcgttggaaaaaggaaatgaatcatcctttatcaggctgctttgaaagcactggactctacgattcagctatatcactgcgcccagcctggccagcgctcagattcagactgcgctgggattcacaataactagtagggtactacctgccctgggaaaacattcctaatttcaattaggttgctttcttgatagaactaaagtataacttaaatacttaaaatatttcctaaaaagcaatcatctacttacagaatcaaattcaagagcttgggaatttaaatcccttggtcaccacatctgtaactttatatcaatgtttaatctctcatagtatccttattggtacaaatgaggctctgactgatagttcttaggaattatatgaagagaaactcattttaaaaaataacaaacatccttggcatcttcacaaatgttaactaaagatagtaatacaggacactaacatataaactaagatctggaagttacggatttctctcctttggttataaccataatcataaacaatacaattcaaccatttcagctgaaaaacaagaacaataaattccatcagatcaatttttttttttcatcactcaaggtttggggagaatttttgttattatttgttttgtcaattctttggcatgacagaacaatgggctatacttcaaaatgaaacaacagaagctcacaacgggctccccagtattgtacaatacgcactgaaataatgatgcaattttaatatttaatcaaataagtgaaaggaattgatcataaagacatggcaatattttttaactaaatggactgcatcaaaactacaaaacagttttcaaagaaacaaaaggataaaagacatccatttttttttctgtttaattaaaagcttattgcaaagtgcagaagccacaggcccaaagcaataaataaatttggaaaactgaatgctttataagtcatgtattataagtttggataagtcaggagttaaatatctcaacattggtcctaacttagagaaaataacagtgttataaatgcaaaaaaatctatgatcggtttgaaatgcaagttgattttgtggctccagaagtgctggtcaaatgcttcccaaaacaagaaacaagaccttctacaagaaatattctactgctcactaggaaatgctaaatctgacaattctccttcaacctttgtttggagaactatttcagaaaacatattcttcctcaaattatgacacacaagagacttgggaggagaggggagaggcattaataccttgggcctgggccgcagagctgtgagaataccccagggccaggagcgcagtctccaccagctggctaaaaagcacatctttccgcaccaggacaaactcggcgtgttcttctctgttgtcatattcaagagagccgtccaactgctccacgacacaaaagacaggaatcatcaaacctgaagggacaaaattcaagagcaaaacacaaacattaaaaagcaaatctcagtcaccacgatgagaagggaagcaacagttataaaagtcagtcatctgtgatcgacagtggtttagattaaacaagcctcttagtcatataggtctaatggaaagctgtgggttttccccctctattattacagaattgcccagggcagtggcagaagcccttagattcccgtcattttcaccaattagaggtgtcctggtacataggtgagatgaaggtgaccacacagacactcgaatcttttaatgtctatagttttatcattaactatcagcactagtattttcagatcagatctgctcttgtctaaaaatctatttcaaagcttccagttgtaataaatatattacttttacacgtaaaagtaatatatttctctttaaatatattacttttacgtgtaaaagtaatatatttctcttgtctggaaatatatttcaaagcttccagctccttcctactaaggtggtattgattttaaggcctaagctgttatgtgaatataataaagtcaatagaaatttaaaataagtccctcttacgtgctgttgtttttttaaatcctagtaaataggttatcaactagcctgaaaataacatgatcataaacatcttaatttacatttatgtcaaaatatgcatccaaatacaaaagtttgcctatgtaaaattattttatacattaacatcagttactggaaagggagtatcttttcttgtgttttcagagaaaataagtaaactaccctaaagaataaagcaaattagtctagttgaaaatctgttgaaatctgttgtcactgaaatatttctctgctttgtatcaaagtgtgaaaagctaaaaaatgtttaattcaccaaagatttttttaaactttttttttatttttaaaaaagtcatacaggcacttaaatctaaacataaccaaggcagaagaagatcaaagttttaccaacatacaagtaataaacatggaccctgcctaatgtaattcacacaaattagtatgttatgggtcttctttttgtgcaagaaaaattaaaacttatgaagactgggtgagtaggcagacgggggaggtagaaagtcacatggtcatggtgaaggtacttcacaacaaaaagaagacctctgtgtgaaatgactagatgggagtatggcccctgacacatagaatgcataggagttttccagaaccccctccctgtggcctcaaccctagaagcctcctgactcactctgatctggaaagccaagggtgggagcagatactctgcaaactactgggttacagattgaggtatttgttctaaagataatacaatggtgcaactggttcccatgtgctaattattattattaaagataataagtattgggtgtaattattaaatataatccttattaacaataataatactcattaagaattgttatcattaaagatcatggtaattattattaagactgcacaacagtgtaacaagtcaaaccatatcacacacaagacaactcagtgttcactcctgagaacaagaaagcagtattattgtctatagcaaatacactctccatggtgtagatttatttaaaaatataagatacgagtggagtagactgattttttagacaaagaagaagatttaggacagctacacaatgccttgtaagatatattttttaattgtgatcattactggtatatgaaatgcttatttatttataccaagtttattcccaaatatatataggacatgtagcgaataatataaattagatttccttcaaattatctttttttttttttctcgctcttgttgcccaggctggagggcaatggtgcaatctcggctcactgcaacctccacctctcgggttcaagcgattctcctgcctcagcctcctgagaagctgggattacaggcgcccgtcaacacgcctggctaatttttgtacttttagtagaggtttctccatgttggccaggctggtctcgaactcctaacctcaggtgatccacctgccttggcctcccaaagtgctgggattacaggcatgagccaccgtgcctggccccaaattatctttgtagtcattcatgtatccaggatttattcactgaacacctactatgtgacaggtatcaccaccagtggctccagggatacaagtaagaacaagtctgatatcactcctgccctcaatgtagttaaaggagttgtaaaaccttcctaagcaagcataatggcattttataggactcattcatgagagtccctaccagcaaggaatagcccccatttagagcttttaactcttacatgctggcatataatctttgcccaaggaagtaggtagatttttatttctaatgatttaagcatatgcacacataaggccatatagtccatggtgccataagctacttcaccactaatacctgtgtgtacataagtttcgatgctgaaaatccatgtgcagttcctaatgtcaacatctgagtgtcacacatctgggaatcaaagataagatctttaaatgaatccaattgctccataagctatcatgtctccattacttagaaactataaatctttctcaagtctatggtcaactgaaaaaacttaagaccatattaatttttaaaaataatattaactgttcagttagatatgaaatataacatgaaagcacagggatctataacatgtagggacttacgttttataaccgtcaattactgaaatagttcctaaacattttggttcagtgattgaaggaagcaattgttagctgacaacagtaatgacttcttacagaaagcatgcaacaatcccctactggcatcatctatttaaaaaaaaacaaaacaaaacaaaacaaaactttgtggtcatttataaaataaaacagtactaaccaggaacgtatgtatgataatagggtttcttctgcagaacatatacatgagatactgaagaatatcataaagggcttattcttagaaaaatttaccttcttactagaatttgacccatctaaacaattatggtttttataatgaaatgcaagttttacaaaagaagaataaaggaggaaaaatagatgcaattactaatgacaataacaagagaaataaaaaatagtaaaatagtatcattgaggtcaagtgtagaaagaagaaaattaaggcacaggtttaaaaggcctttaaaaaccagaaatccctaagggaagcaaactataaaaggatgagtaaaaatatatgccaagaaagagagagagagagagagagatttgtccatcttattaacaactcgtcccaggcaaaaagagggaaaaagaaagaaaaaaaaaagagagagaaaagtgacaatggatagaaagatagggaggtgcttgaaaagcacttcacagaataaattaagagtggggagaatttaaaagttccaataaaagaataaaaatgtaaaactgaaatccattttcaacaaaatttagaaatggtgaagaaaaaagaaaatcttgctctagccctatatcttgagcttccaatattatttttcttttattgtagcacagacccattttcagatgatctagtagagaactttgaaccttctgatcataagccttactaagccttttacaatcacaggaggtaagcaggtactttaatctagaggacaggcgctcggcctcagccatttgctaaaaatgaagagttgttctggtaattgggataaatgatgaattctgttgtcaaagaggcaaaacaagcctggtaccctctctacactagaaaaatgcatttttccaactgtcattagtgatgatactgaaactgtcattttcattctgacattatttctaaagaagtgtgtataatttataaagcgttaaccattgtaactgccactgttcacagcaacagctgtgagaactgagacatgtgggaaaatggttagatgtggtgatgaacagcaccaggtcagggtcaagtcctggcactgtccctttttacctgtgtgtgaccttgagtagttcatcttacctctctgaagctccaattcctcctagccaaaatgcaaacaatatctacatcatagatctgttgtgaagattaaacaattttacatatttaagttgtctgacagatagctctcaaacaatggaatctatttgttttcctttttttcaaaatcggtattaataccattttacagaggaaaaaaattaaccagtaatttttttcaaggcctataatcaatgttcacgatactaaaaggcatttcttcagaataaagatgatactaataattattgaatggcctattatgcaaatgacaactggcttaaagtgtttaacatgccccatggcaaaaaaggtgaaagtgcttaaaagcacagtaaaactacctgtccatcacagtagcctctaacttcatgtagcaattgagtacttgaaacatagctagtctcaaattgagatgtgtcgtaagtatacatactagattttaatgacttaataacaaaaacaaataaaataaaattattttttaaaagtaattgtgtgtagaatatcttgaatatattgagttaaataaaatatattattaaaattaacttcacctgtttaacttttagtgtagctactagaaaatttaaaattatacatgtggcttgtattagtatcagagagcactgttctaatgaatctgcctaataacaatatataattttttctcacacaggatacatttatcacaaactgatactaggccaatagtgtgactgtcgtgagccctttagctgtctttcctctgtgttccagctcttaggagtcctgaagacagaagcactcttggttaaattccaaaatccaacgtgttaccttctctgcaattgcaggctgctgttttattactaactatattaatccaacttcttttattagggaacagctctttcccccttgccttcattttaaagaatagacttcaggaaatgtcacaacactggctatgaaagtgacctgaggaatgcgtattctggaaggctctgaatgtttaacccaacaatgaaagacgaaagatggtgcagctgcagcagggcgtctaggtgacaggattcaatgggcttgcgccaaagttgggacatgaaataaacccctgctttgcactgcacttcctagatcatcatgtagtctaacatacacacctttatcttctcacatttactctgtgacagggttagcattattttcagttaataaattaggaaactgaaactatgggagaagtaacatgccccaaaaaacacagcaaggcaagggcagaatagttcaggttatccagctctaaatcccaagcaggctgctttcctgagagttgaaaacaacactccagaatccacatccattgaaatctaagggcttggcctcttaataaaaaggaccctttaccacttgctatgtccaatgggtgacctgtactacttgtaagtgaattcaccttttgtctgcctaccaggtgtctggcaccatgctaggcatggagggggaaactaagagggctcctgcccttccgttattcacagacaaagaaagaaacaaaggctcacatgaatggtcatactctagtgtaaatcagcactgtctccagcctcctccctagctcctttgtctccttggtccaccagcactcctgaatgacaggagccagtttgagatgagaggaggccaggctttcgcctcccctctttcaaagagctcctgaagcccatctgtctcttgaaggaaggcagcagacagggcccactcccttccctggagcctgcagcttatctagttctatcacctgagaaggtccgagggctaactggagattataaagactgtagggcaaagccttgcatatcttttcttcgtataaaactgaacctgaagtaccaaagaacaatctgtttgaaatactgaaacaaactttaccacataaactgagtgaataacagtcttcaagaggacagagagaaaaagtgagggatggctactattttttcttattgtaaatttaccagaaaatcaaaacaacgatttacttgttctataacctcatattctcattatctctctctgtctctctctctctcacactgacacaatcatacacatacatactgagtcacagacaagaagagaagtaacttgccaacattaaccactagccccttctttccatcctaaaataatagaggctgggcgcagtggctcacacctgtaatctcagcaatttgggaggccaaggcaggcggatcacctgaggtcaggagttcgagaccagcctgaccaacatggtgagacccccgtatctactaaaaatacaaaaactagccggacatggtggcaggcgcctgtaatcccagctacttgggaggctgagggcaggagaatggcttgaacccaggagacagaggttgcagtgagccgagaccatgccactgcaccccagcctgggcaacagaaagagactctgcctcaaataataataataataatgaagaaaagcctgagtgcctaaaattgcaaccataaatagaaagaaagaatagggtgtttctcacctccctgttggggtctcaggaaaaatttctaaaagggatgcagtgtgtccttcctaatctcctctttgtggccctgctgtcctctactaggcacccagccccctgggctaaggcagccacaggctctacattccactccagcctcctactccccccaggggctgatctcaaaaattccacagattaatagataaaaagatgcttgctacactgtttgaatggtttagtgttctccttaatctcctcagctaggtcttcacagtataatatatattttatttcaaataaatttctcatggaagaaatttcaggtagtataataagaaacagtagaaaaaaaatttcaccaattttaaaggagagagcagagcaatcatttggatgcaaagggagccacccacaggtccacaggtggaccagaggccctctaggctcccccagctgctccagttttcaacgctcctccctgtcctttgcttgtaaactacacattccctgaaacattaattcacttgtttttctagttggctttttcttaactcttatcgtagaggaagcagaagccaagacagaggtgggacagcagcaagttctaagtggtttacaggtagagatcagtcaattttccagttatgaggaaggcaaactctgcatcataattacttttttttttttttttagatggaatttcactcttattgcccaggctggagtgcaatggtgcaatctcgactcactgcaacctccacctcaggttcaagcgattctcctgcctcagcctcccaagtagctgggattataggcatgtgccaccgtgcccggctaattttgtatttttgtagagacagggtttctccatgttggtcaggctggtcttgaactcccaacctcaggtgatccgcctgcctcgacctcccaaagcgctgggattataggtgtgagccaccttgcccagccatcataattactcttaggtacaaactgagccatacatacaataattcaatttcatatttacccatgacccaggtgcaactcaggattagacctccaactaaataataaataatattcaataatattgaataagagtaagaaattaagagttaagaaatattgaataagagttaagaaaaaaccaactagaaaaacaagtgaatttttcagagaatgtgtactttacaatatattgaatattatttctcaattttattatttattatgaaataatattcaataacatttaatattgatttatttgataataaactccttgatggctctcccactatttgtgggggcaatggggttgagaatgatatcaagaaatagcttattctcagaattctctctagtaaaaccagatactactttgcaacccctgaggccaatcttaactttggacaataagaacaaaaataggcagggatgaggatgggagagtggacgctagtcctcgctcactgaccaccccgaaggatcaaactgggcctaaagtggtagggaagggagatgagttctggccttccacatctctgattccaggcctgactccaggcaaagcaatcacaattcaacctgaagtcaggtccgaaggctgaaggagaaactccaggtctctaaacatccttcggttatagaaatttagtggcaagatcaaattggccaggcagtttgcaaaacagtatttcatgggcacataggaggcaatttgtggcagcttatctaaacaaaagaagcctgagccacacctgggaactctgccacagcaagcctgacctacggaactaaattctctgatgtcaggaatgccaaggctctagtgggtgtagaggagaggcccaccgttttcctcctcaaacatgggctggacttagctgcctcatgcccctcccaaccctgagcctgacctatatagtaggcccaaaataaatgttggttaatctaacaaaatgccaattccagttagatattaatcaccaccattaataggcagtgtctgcctagctgtcaaacttgtccatatcactctggccccattgcactgcactcagcatcagcaaacaaggaaagctttctaggaaatgatccacataagtggattcaggagcttgctccatgttgtccaggggatgttggccagatcacagcgctgtgcgtgaccactattgacagaacttgtcagggtatcaccacgggcatcgcatggatgggtgcgtaacaaagtggcatgctgcaccatgctctgtatacaccctagagccacgggggtcttgtcggcagtcctacccatgtcctgcactgaaagactacagtatcttttctaaatttagtaactacagaaagacaaaatgtttaatgatcctagaatttaaaaaacaacaacaaaaaatgttataaggacaaaagagccgggcacagtggccagagcctgttaaacccagctacttggaaggctgaagtggaaggatcagttgagcttaggagttcgaggctacagtgagcaatgatctcaccactgcactccagccagagttacagagccagatccatctctaaaataaataattaaataacttttaaaaatagaaaggaaaaaaacaggatatacaagtttgaatataacagaaaagttcaagggtatggcatattgttgaagtatccttagttcaagcctaaattcttcaggttctttttacgataggttaaaaatgcatatatgtataagtcctgagactcgaccacatgttaaaaatgactctaccataatttatgaatgctagggtttctgtcctttgttaagtaaaatttcattctggaggtttctgagaattttttttttttttttttgagacagagtctcactctgtcgaaaatagtatttaagcagagatcgattcacctccccaccttattctcatcatcctctctggaaaagctatttgcaactcagagtcccatgcatcaaaaaaggagtcaatgaaaattgtccttatactaacatttacttcaggttttgagctctgcctaaatgttattttatctaattcaaacaattaaaaaaaaacagcttgattaatttctccagtgtagtgttaaggaaaggttaacagtactgaggtcctcttgaaaggaattaataaaggaatcaagtgctcagctctcaataagacaagactacccagatttctagtgggaatatttcatagcacaagcatgttttctttggggagtttaactcacaaaaattattaaaaattgagatcaaacactggtgcagagcctcaaaggaaatcatactagaatggagagatttttatcaaataaaaactgaaaagtaaagttatagcaaaaaaaaaaaaaaaaaggctttctccctcacaaaaagaaaatcctactgtctatgtttagagttcaaacagcaaaacatttacggatacttaatagatgtgtagaaagcaacactgtgcaatgaatgcagatttcacaaagccgagcttaagcagacaggcaactaccaccaccatttctcagccattaaaagccactctcattcttatattcaacaaatgcatccatcaagactcaataacaaccaagctggtgaaagggctaacgctgaaaggagaaagagaaaaaaaagcaagagggagaaagagcaagaaagtcaaaatcatagtgtgtattctccagtccccttaggggatctgactgagatctctggtttgcaatacataggatattattattgtgactcagatcaagttaataaaacccagcctacagaccagggaaaccagggtctgatggaatacttcccagacaaaatattttaagtatatatgtagtgcctgtgtaatttatagaaattaatcagaaaaacagaacagagaaaactagcatttttttcactttatggttctaatacatcctctttataatttatataatttccaaaataaaatattaaaataaatattttaaaaatgaaagagactatttaagtctctgcatataaatctcttggaaaccttatgttcatcctgaatatgtttatccaaaggctatcacccagccaatgaaagagttattccactttttactgcctttgagaagtgttatcaaagcctaaagtgatttgtctcctggacaaaaaagtgagaaatcttttaccctaaataaaatgtaagagtctaccttcctcaaagcaaaaaccctggaagactactgcagcattttaaattgggagtaattccaagtattaacaccttaatctcaaaaagatttcattttccctagagtccttggttcataaattatttaaggataaaatattaataatttctgagccacaaaataaaggtattggtgttgtccccctccccctagaaagccagtttcaaaacagttctattctgacaagcccaatacaaaataacagaaacacaagtcaaacattatttcaaactccatattgaaggaggaaagaatttcatctggggttaacttaatagtatacgtttaaagtttgtgggtgaactcgagtatcacccaagaggtaagagctactattttatcttggcaccatcacgctacatctagatggagatgatagaagaaactatacatgacagtttctataagttcatttattttgttaacacaaataggatcgacaaacagctatgttttcaaagagcaagcctgtgtttattctatatatgagaggctggcggcgagaaagatggctttactgagtcattctagcaaaggaagaagagagctgcatctcagaagcctgccttggttaaaaagaactgtctcccacaaactcactttcaagctatacatcaatcttcaatataattatgtttgacagaatataagctcttggcagttaacttgtttacaataaatgcttagtttgggtacatggactgtatttcagtcctacaaatatcaaacacaaacctacaacagtcccgttatggagctgagaattattttgctataaatctttttattggggggccaagggaattactttgcagcttgtttcccactaaccacctggaacagtgtgaaaaaagaggtacatttatgctctgaccctgcgctaattggaatcctatacatttccacaggagaatgttcagtatcaatcctgaacatgcaggtcagtccccagttctgccatggcagcaaaaaatacacatgaaacaaaatggttcttactaaagtcacggcattttcatacagttcttttcctcctcaaagtttcttgggaactaatgaccatttgtaacagtgttggcagactttcaatggtaagccccagttttgggggagtttataagttagctgtaaaaacgtgcttaaggctcaaacttgccatatgaaagaggctgtaaatagaggtagttttgctgcatattacctagagattcatttgagaaggaaaaaagtcaggatcaccttatttacccttgtaaagtgactttacctggttattaaaggtgtaataacttcctattcagggaacaatttgctcttcttatactccgtcgatactaaagggtttggggtgttctaataccacatttcccaaatctaaagggcaacatctgaatggagatgtctgaatggagactctaggaatgcttctctcctgacaggcaccttcactctgaataccttctggttttcggatgaagacaatttatcattgcaaggtttctttagtgctttctaatttcccacttaacatgtaattagattcctataataactcaactttaacatagtattaatacatcaaaaagatcatattaaggatcacagtttattttccaaaataaacaatactgaaaaattcagtcacgtaatgacttaatattaagattccaatttcttcctttctagtcaatgttacaattacaggtgacaaaaaacttaaaacatgtttgtctctcagcttctaataaagaagaatagcaactgatttataagtttcaactgtcatgcaaaatggttttattaaaaaattttaccacagggttttcttgtatacaggggagagggacagaaaagaaaaatattttcactacattatcagcctcacagaacttccttgttaataccaaagcactattttgcaatgtgaactaatggaaaattgttaaattcacctaaaataactactcctttttttaaactaaagaaacccttttaaaaccttgactatttaattgctgtttacttggggaagagggacatggagaaggtgatcgtatgaaaaaaaaaccaaaacactttcttttaattgtacaacaaaaattccttccaaggcaaaaagacattatgccaagttccacccagaattaatgtttaggtttaaattataaagtccagaagaaacggaaccactaatagacccttaaagctcatggccttcatcaacactgttaggttacgcaaatgttaaaactgaaaaccctttgctgacaaaagcattttaatgaaggcactattaactaggctctatggattaaataacttttttaaaaaagcttttttggggctgtttgatatacatcccactctaaaagggatgataaatgctcgggagagttctgaaattatgagacctccaccaggaggatgtactgcctatcttgtttctttcattttgtcacctcaggaaggtttttaaatattaaatccaagaaactcagcgacagatgaaagaaatattcccccctaagtctgtcaactgagtaaaacctggagctctgactactctgatggccgacattatctgcagttttagtatccccaccacacatgggggtaacccgagttatccccacctcaggtatccccaccctaagtcaaggttcccgggtgaactccaccgtcaccacctaggtttcttcaggagctcacagtttctattaatagagtaacaaatacagcccagagtgaggcaaaacgagccccaggcagcccctgctgcctggcggttcattcggagttgctgaaagcatagctctgtggaatgagagccagagtctcagcaatgttaaggacatcgatttcataattcagaggattgcaggtcgaagcaagagcctctgcatttcaggtgacagtcaggtgagtacacctcaggtgatgtgcccacagagcaactcaggttaccccggtgtgtgctgagaagaaatgagggtgctcattattcagcctcaactctctccccttcagcctagtttggactttgggaagaggaagaacagcaggcctaggaaccccatctaacccttacttggctgggctttgtaacaagaggaacattcattacttctgacttccatttacagagacaaaaaaaaaggagggggagagagtagttccacctcaggtagaatttaagaaaatgggattttcctggtcaaactgtgtatgaagacaaagtcaatggtcatttgtaatgtctcctgggcaaccactttccatgggctcctctttgaacttcccagggaagaatgagagccaaatggtctctccctaaaacagattttagctaataaacacaacaaagtatgcgaaaagcacttcagtttttctgcatcttctccaagactaaaaatttgtacattgtgtgacaggtccacctcatttttcttaatgatgtttttattattctttcactcaattaaagcagaaatggatattgcatcttctgactgtataattgttattgtaatctgttttcgatcactgcttgggaaatgggtccaaaacaacataaactctccactgcctcagaagacaagtcattttcttttactacgacacttaaagagacatttatcatgctgctctgttagcatctttggattatgacaaaagaaagttcttgttctgttaacccccaaaaaataatatttcaaaaatgctattgctatttcaagtgttttgatatgaatgcatcgtcagtaagctattaaatatatcaattttgcctttccttatatgtaataataattgaaacaaatgcaataaaagtactcaattttaatataggacataattgggaaatctaaaaatacagttatttttactttatgcctttggtcctttggtcctttcccaggagtcttgggcatggcatccaatcaaatttgctctctttgcaaagaaaatattttcttgtgttaaaaaaaaaatcaatcacaatcagttatgaaagaactgatacacttgctttccagccaaatgcaaaaacaagtaaaaagtattttttaaagaaagaaaaagatatatgtggttaacgtgatgaaattcacgctgtttctacgacaaacccctgcaaatcacctctgtcagatcttagcactttggaaaacatttgctctaactagagtctcttattttatatattatatacataaatatctgtgtaagtcttcagtcaaataaacaaaagaaagacactgagctgctgtgcacatttcagtaactgtgcaaccatcagtgggcaccagttaccctggtttgaaatggatcccttttgataaatagtagcttgcagtgcctccccttaattttttgatcttttttgttattttacagtttaataaccaactgtactacgatagaactccattccaatgatacggctactaggtaagagcagaactgaatctgcccacacactattagtgagtaacagtaccaggagcaactaaaattgaaatatatttccccagaaggttttcctgtcctatgtgtcataatcattaataaagaatatgcttactataaaactgacatagtttgctgataactttattgcaagtttcaaattcttaaaatttctattcatgcttttatctgcattttaggcatttgtcaaactaataaccataacatccacttgtttaagttaaaggacatcaattaaaaaggggaaaaaaaatgcatgccataaactctattgtcataattatatatctaaagcacacttgttccatattatgtctttttatctagttttttaaaaatctgaaataagtaaaactttttaattgagcagcaaagatacagaagttgtagaatgcaatttctgatgtagcctttcagtgccacttaattatactgattttaccacaattcttaaatcacttgctactaaaaagcaaaataattctgttaattgaaacaaatatatatagctagagttccataattttgaaaactccaccatggaacatttttacaaaaacactgtagcatgttatgcttacagggcttgtttctacataaaagaagaaaaataatgtttggttaattgctaacaataaagagcaacggaaaatagcatactataatgactacaactgtgcttttttcaaactctgtaagtcctcaactggtttttgttttagtcatacctcagttccactcagggcatctactttgactttgaaatatttatcacattacatttaagtagtaggatgatgaatcttttgtatataaaaatccattttcaccacagacattttcaaaacctctattgcattttaaaataacaggaattcacagctctccttactggcaccctaaattaatgctggagagcagtgttgattggaagtgaaaaaagaccatacaatcaaagtcagtagaggcaaatcattcatttaaaaattgctacaaagaaaagaatagaaactaaaaggcaaactcttttcttcatttttttgagttaagcataaaggtctcctactcgaaaccattttaggttatttctctgttttttccaaaaaataatgagttaaaatgtatgggttagatccaacatttcactgctgttcttattcttggggagtgggggagacggggaacttgctgccaaagcttctgaaaagagactttgggctgctaattttccgttcacaaaatctaaattccccttatgcattctcacacaactcatgaaataatatgaaacagtattatatcactgcaaattgagacatttttatcaaaataaagagtgatgatgccaacatttcatttgtcatttcccacttgtcacttttcactgacaaactgttacacatacaacttttgtcaaatgctccatctttaaatatgttccaaaatgccattgtatctcagtattcatgtaaggaagatagtaaaaattactatgttaccatatattagttatataggttttttaaaagcctactgattaaacaatataaagaattctttattaatttacatgctatataggataaagtttggctttctgaaataaaacaatgtacatattttacacacctaatgtgggttcttagtcataagaaacattttaatggtgagaaattttattccaacagaaacctaaaaagctttaaaagataagtataacccaagaaaataatactatttggaattcatctagccctgtaaatttaacatgtctttttaaatatatacacatatgctgattctataataaatactttttaaaaagaaagaaaaataggggttttaaattataaccatcaaacttcactgcttactactttgtcagatataccaaataattactgtagtctttcctggaataaaactgatttccgtatacttaaaatgactcaaattcatattcttagctatctaataaatgatgattagtctgttttcccttctctacagagatagattggttaaaacaaaattcaagaaagaaaagaagaattcaaacaggatatctcatatgtacagactttgctggttacaaccctctgggaaaggatgatattgcttattttctgcaggggttaaaaaacagatgccttaagggacatctatgtagttccaacacacacacacacacacacacacacacacacacacacacactgcactacagatgatcttgagtatacaatggtcagtgggtttcttctgatggaacataaggcttccaaaattacttgaaacatcaaattatgctcaggactttgaggggcggataccctatgttctgtttaatgtgtatgttccactgcatatatttttttaaccaagtatatctttattttaataacaggccaagaactaaaaacactttagagaagagttatttttctacctcagcaaaactacagaggacaggctagattgttggatgaccccaaagcctaagttcattctatttaaaagatcttaaaaccttaaaaaaaaaaaaaaaaagtgaggagggagaaatacaatcttttctcttttgaagtaatgtgtacttcctacaaatattatgatattcatccttgggaatggagttttctccattttgcccatgttaacaatatatttctaagtattttataatctcaatatatacctatctatactttcatatctgcattcctttcaaaaagttaaatgtctctctactgttgctgatatggtgactacacctgacccgaactgcatttcttttcatctaaaaggaagtgttccacatgtagacaattaaactaactgttgttgtagacaatgttcagctttaaatgaggccctgactaacaatcttgatcacatttgcttccctatttgaatacatcagtgtgtactgcataatgatttttttcccccttgcaacaagacagttatgttcttgaaagggctgcctggtagcacgaataggtctacttcaggtagactagttataagataactttaacagacagtatgccaacaaaattaaattgttatttataaaacataaattatttttcagaaataagcaagtttttttaataaaaaaagcaaatctctctaaaagatattttcaatgtttaaatatttttccctaaaatgtagaacatttaacaccaaaaaatcataaaaattcataggaaaatgaaaaatatcaaaaagatttctgatgtttaatgtctcctatcagcaaatacaccatctggtatattcaagcgctgttcattcagtttaaataaagctgtctgaaagttcttctttaagccaaacattaaaaaatgaaaatgcttgtgttaacaatgaatgaagcacaataatttattgctattaaagcacaactggccagcacctttcagcagtccaggagaaaagcagaatgccttgcttcctctggaaacttgattggcatcactttcattttatgctgtaagttgcatggctgaagcattccatacagcagaacattttaggtacttatgctaatagtggtaaaaaggatcatctgattcttattttcatcatccttaataatcccttcttttcctaaatcttcaaatagatctgtaagttttaatcaacaatttcacaaatataaatttccccaccattaatcatcctttttcaaaatccttatggagtgaattactagctgagaggggacgccaattctagtaagtgaatgttacccagcagggatataaagctgtcaacaccatggtgctcttgctagctctaaactctctcctagccttcatatgttttttaaagagatattagccttttttttttcctaaggaccgtctgtaaaagctgactgacatacacatctgagcacttacattttattacatacatgctttaaaacacactgctcagataagagtaaaaacatcccagaaagtgttggaaagacaaagcaaaacatctagtttctaacagtcttctaaagctaaccacatagtaaacaatccacttttaagtcccctgttaaaacacaaccttaaagacagtgacagtgtatctaccctctcttctatttaaattgagacactaaagtaatgccccttcttttatgaatacttagttctcatcaaaaaacacagtaaattccctctacctaaataagtagagtaacagcagaatttattactgcaaccaatgcattcagaagtatatttaaactatatttacctcactgcttatcaaaaacagtaagataaattgctatttgatttgacaaccaattaacttgatctcccttatttttaaaagaacagcttttaagaaagaggaacactaaagattaacaaatatgtactcccaaatttttggctccacttttaagacaaattttattgtatccatcattacaccattgaaaagactgcaatatatctgaaaacggtaataaatgatacagagctataaatacttgtgtagttatctatgcttattatattgctttataaagaaaatttaaacaaaagaacatagaatggtagaaatataatctactttatatttactctatgttcaaaaaaatcctttaattataaaaaaactaactagaaatgtattttaaacattttttaaaatttagaatgtgcatttttcaaaaggcctggctttgctccaaactgtatacatggttaacagttacaaagaaactattaacatcttaacatacatttggaaattatataaacttaaactcataattttgttaacattcaattagaaacctttgtactatcaaaatcttatcttctaagttgttatattctaaagttgtctaaattaatctctttacacactattatgctgtcttttttaaaaaaatttaaattccactaaacaattttaaccagtttactatcgtgtattataaacgatatgtattgagacaaaataatgtcatctttattttcaatttgggaagcagctaataagacctctgctattactaaattaagttaatcaagagaaagtgtctaaggcagctggttgaaacaaatctattattcttcaccaagataataattttagtttatattaaacacataagggctcaaatgtgaactatagtctcagaaaatttgaaaaccaaccactatttaacactaaagttatccctggtcaacagaacaaggcactttctttcatagttcaacatgatatagaggaggggaaaaaacttgttttagggaagcacgttgttaacaattacattctaaaatgtttacagctcctttcaatttagtgaattttattagatcttcagaaagataccaaaattttaagtccaagccttttctgtccacaaaggccactttggaacacactgtctccaaggagtttcagaactttttcaaacattttcagcacttagcatatctcataattggtaccatcatactctatgaatttttatttcttatatgcatatactaactgattatgccaaaagtctgacattatttgctccagtatcaggacaacaaattaataaacctctcttttaaaaagtgggtcacagaactgttttcttttgcttcaataaagtatattttcaagtcccaaaaaggggagataaacaagccagaatccatcaccaaactttttaactcacaacattgaaaggatgaatacttctcaagtgagacgattaatatgaaagactgagacaaaccatcctaagtatttaccatgaagaaatagaaatagcaaaataagtaaaaagaaaaaaatacgattttataaaacgtatgtgttcaactctttaaggaggaatgaacatttttagatgtaagtaactattttgaaatacacacaatagacacttacaacaagggggtgggagcttatcattaaggtttgccaaggttttatatcatttaagacaagttaatatattgaatattaaatgggctactgttgaaattattagagaaaaaacgttagaggcaaaaaaaattaaactagtgatttatgccaaacacacagaaaacctgcatgccatgtggaattgtggattttacatgtaaaagacaactaagcaaatggcatacaaactccaaaatatttcaatgtttaaatttctcccatatctttattttgtatgattgcttttcctgaccactttaaaagaaagtagttgcttaagtagtaaaaactacaaaagattttctttaaataaaattattaataaattctttggaggggaaactacatctagttgataaggctactttgctatttttatctgttctcctataattcataataaagttacgaatgcatatgactaaactttatagacaacagcagcatttaagcttctaagggcctgatggattcatggtgattctttatttcccacatttcacgtggcaggaaatattcccagttgtcattcatctgtcttgaagcactgtcctcactacaaagtaacatcaactctccttgttcctgtactcgcctgagcattaatgactattttattccctaaaagcgaacgcacgtgaacttcatccctacaacagacactccgaggcaaggcaaaagagttaaatcactaaaaagctctctaggaaaatctagaaacagttagctggctgtgacataaacctgccaacacctcagcacacagtggcaaaatgcccaaaaaatgccaccctctgggtaaaaccactttcttgttttaactggagatgaagctaccagttgcagatgagaggcgacgggggcattatttggcaacctggaattcacttcctgtaatcctacaccgcgacagcgcctaatcaacctgaaccctgacacccgggccattatcactgggccgcgggctgcgcgcctccctgctccgggctgttacctcccacggccttggccacggcgccgttgggcctcccgcgggctcccatggggctgccgttctgctccagccgggccaccttcactgggggaggccccttgacgtccgggctgccgctccgccggtcggggctgtcccgcagacacgggctctcgctccgccgctccatgctgctccgactcggagacaaagttcccaccggcaggtcgcaataaaacgcacagggacctagggagggggtggggggaggaagggggagggagaaaaaagagggaaaaccgctcatacacgtgatagacgttcaggccagtggcagagcgctgcaccacagccacacaaacttcctcccacgctgcccgaggggcccgagccgggaagccggtcccaaccttacactgggcggcccccaggaagcccagcgcctcggttcggcgactctgcccagtcgcagctccccagaagtcagccctcggggtcgcggccggggttggcacccaggggcgcctagaagtggtccattcattgggacggggttggcataaaccgttcctgggtgctacagcctagcccgtcccggggtcagggttgcggaataagtgaacttcagaaaaagacgttccacccacatgggaagggagttgggggtgtgcgcaagtccataaccgaattaaccacccggtaaatgcgctgtgaatggccaggcaggagccaaaggccgggcgaaagaaccccttgaatacccgctttttacctatacggagcaagtcctgagataagcacacacctgcataaaatcaaccctaattccacattaataagcatccgaaaacacttggaggtatttatcagaataacctccatcacaaaggcgggcgctacaatcgttattattttggagcgttcttatcttcatctgatccccagtgcttttttaaagctcttcaatataaaacacaaaagcaaaaagcatttgaattcttagtgcaagagcagccttcatccgccccaattttaacatcgctccagaaagttttcctctgggtcactaggttggcagtgcgctccccacggaagccgcaggtctcgacacccctggattgggggggtgggggggggcggggaaggaggggaaacacctgatgaaacggcgctcgcgttgtcactgacacccgcaagaagcaagaccccggcaccgtactgcgtgcgcgctgggaatcctcgtgggcgctctggccgcgcgagcagtgtcggcgccacgggtcaaggagacaaggtgggggtggcagggggaggtgaaaggaaggatgcgagatgaagacacggagcaggagggctgagggcgaggcttccgcctgcattccccgacttcgcggtccgagaggccgagagcggcggggaggggacttcgttggccctgggcttccccgaactcccgagcgcggcgcgggagccctcgccctgcgtacttactgctcacggtctgtctgaaacttggctgactggggctctgtccatggagcaaaagtagagaatccagggtggaaagtttctggtgcttggctttgcagtgttctcctagtcttcctctttactccttccccttccctcttccccaggtcctaatgtttaaggtcctgggtcagggtgtcttcttctggtgcggagatggttgttatgatgatgatggggggagggaggagggggaggaggaggagagggaaaggactcctccaaagggacacccgagcgagcgggggaggggacggcggaggaggggggaagagaaggaggctgaaagagccttttcacaccttcgggaaggagacccgttctggagagaaagggctgagaacccggaggcggcggcggcggcggcgagccggggctgctggttcgcagggcggctagctcgcgaggaggcgcggccagagcggtgggaccggtaacaccaagagccgagaagacgcagggacccgggaccgcgcgcgggaggaaacgcggcggccgcccaagctgtcacctccagcctctcccctctcggccgcctctgccagcagccagagccggactcactgacaagccgcagagagagacacactgagagggagatgattattagttgcgttgagtcatcaggcaaagtgagtccttttgggttgtcctcggtttccgatttctccccctccccctttcggtccccagatctagcgccttcaaaataataatttggggtgggggtaggggaagtctctggattatttcgggatgggggtgggggggatggatctaaacccaagccagactggtccaccgcaagaaaagaggggagtggggggcggggaggagggctggggaggttgcggggggaggggggccccgcctggcaggaaattaaacatcaatcaatcaatcgctgtgagcacggcgacccaacggcggcggggctgcgaaggaggcagagggacaggcgaggggcgggtgggaggcagggaggagggaagaggaaggggagagtcggcggtcggagcggggtgacgaggacctcatgcacgaggcggcgaaggaccgatggcagagaaccgagtgcggcgcgaggcggtggccgcggccagcgggtgggtgcgtctgggcgcaggcgggcaccggggcccagggtctggtcctcctccttgtggcgggtccagggcgcggccgcctcgcccagcccctaggcgcactcgtcccggcgcggaggcggcggcgacaaggcagtcgctgggtgccgcgtctgccggcggagacgcagaccgacgcgcaagaggcgaccgcggctgcctcggctcccagctctgttaactgcgcggagtactttcgactttggagataggagggcgatcgcctcccccacccaccgcctccgcccaccacccaccgcctccgcccctccgagcaacttttcccggtgcctgcgagctccccctccgcgccgagccgaacgtcccggcccgccgcgcttcgtgccgccgcgcgcgcagggaaggccgcttctccttcaaagctggcacggccgcgagtccggaacaatagtcggggtgtcccgaatgccaggagcacggccactgcccgccgggctgtgggtggcacaggaatgggggttgcgtggtggatgcagagcggggtgcatccctggatggcatcgctggagcgctcgccgctccggcgacatcgcgagcggtgcaaaccgggccgcctggagcccgtgacgcggtggcggcgagggcggtggggctgcctgtcctcgggctacaggactggggctcctggggaccccaagctgctcgagcccagggctgctggcgccaacagagctgtgccctgaggacccggcctccccgcccggggggaggccgcacaggagcgtccccagcaggtcccgcgaaggcgtaacagagccacaaacttttgccgactcccgcggccgcggccgccggcagcccgactccggccgcggtgctcatttaaggtggcgcgggcactagccgagcaggctggcctctggccgcgcttttgtccctgcgattccgcttgggcgcgctgcctccttaaggaaaagcacgtgggcaggggccgcagcccccgcgagatacccggggcgtcggcggacattagccgctaggaccttaggcgagaaaatgtggacgcatccccgccggccctgaggccagagaatcccccctcaactggttgcacctcatgtccctcccgcacacgttgactctccctcctaatccccaggaccccgagggctctcccacatctcccgcagcaagagccaccgatcccccttaagaagcgttgactgtacggcggcgccagagggccaaactaagttcggtttcgggaaacgctctcgggagcagttctgtaaatccctgctgggagcagagactgcgaaaagctgagtccgccgatcgtgcccgggacaaggctgccttccactcgccctcgccgcatctacctggtaggcggcatgcgcacgggcttagaggcttgagagcctctggaagagaaagggtcccaggaaggaaacctgcccccggcctaagtgtcggcgcccagatcaccacgaaccccgcacctaggcgccgcccaccaagttccaaagaagtccgaggcgacctgggagtcggtcggatcccagccgagaaaagaaacaagcaggatagcaattcttaggggagccaccctgggagttttaggcagcgtttgcctttccctggttttcttcaccaagccccatcctccccccgcataccacccccagtcaaaagagtgggagaaaatgcacagttcgaagtcggtgagagcaaaaatgggtctagtaaatcaacccgtggtggtagctaaaaggtttggggctgcaaagaaacaaactgtaagttttgagcaacaaactttttcttcaatctgtaatatgtcgaaatgggaagggggtgttgcaaaagccaactaccactgtcaaacttagcccgtttacaacatggggaaaggcgtatttcttactaatatctcaacaacgataacaatgctgtatccttccttaccttgatgttgaactgcgaatcctcctccggatcaatgtccaggaacttagaagaattggtgatattaggagttcagtacttctggaaaaaaatgcaaatggtttagccaggatctttcctgtctgattcgtcactattattatatctgatgatgcgaatggttggagcgattcaatcctaagtcattaatgagctattttataaacaccactgtctgaagatcttcatttacattttgctaaggatcacttcgctaacctcacaggcttgtgtcaacagcatgatttgcaggacttcagttacactcttataaacaacacggctgtattgttaatcggttaatattttataaagtgtaaatattttattatgttttgaagggaactattgattctaaattattaaacccctgagaaggactatttaaatgaaatatacaattaagtacaattaaatgtacattgtggttagtttgttttcagattctgcacccttttaaattcattgcttttctctttactggagtttcctcttgtccatttctgatactgaaaaaaatctatcatgttaggaaaaagcctaaattatttaaagttgcattaaacttagaggaaaatgtcaaatacgattaattatgaccagaaatgtattttggatgtttgtagagttgtatttcatatcacattttacaaatttcttccgatttaaaggagagttctaggaagttttgtgatctatgtccggtgtgggtttttgtcctctcgagttttgtctctaataaaggccttttttgtttcaaattacatacgctttttactgcacaatttttgtattgaccttatttcaactgaagcgattatttccagcaggtttaatttcgacaataagatatattttaatagttttacctttcgctagaattttgtattgtttaaaacagtaaatgaataaatttgctgatgattcaagaatatttgtttggtttcgttttgtatccctcaaaaggtttatttccaaactttttaaaacaaaatcacgagaaaagagttgttttaattacgtttgatttttaaaaatacttttatctaaaacccattttgtgcattaggagatagtttgcttccatgctcaaaacatggagttcacatctgggggacatttttatccctcagtttccttctaactgacgtttttgtcgggaatctgctcagacttttccccttttcttcacccacctcccaagttttccttatgtaatttagtaaaaggccgcctgtttttcacaaacacggatttgttattttaaaaatcaatagatctttatatgctagtgttaaaggtgtatggtttttcttatttccatcttctctccttttctctctgtcaggccttcttttatggcctgcactctaatgacgtttcttgatttctctttgtcgacaccaagtttttgttgtgcgtgctttcgaccctggtcaaccttccttcctagaggcccgctccggacagcgtaggcctgggcgcctgggtggagggtgcagggtgccgggcgcgggacttcggctctcgcctgggccatcccgggctctgagggcccggcatccatccccaaggtccatggctttcaagttcggtcacccaggcagagagaccctgccttttaaagagccctggaaagttgcgccgcgttttccctcaaccctggaacacgcagggaaaactatgggaatcgcccgcgtcaaaagctttcgacggcttctaggaacccaagcgggcctgcctcttcccctggagcttgccctcctgggggcgggaggagggcgggagggaatcatttctttcaaatgaagcccacgccagctctgaagccaatttccgccgcggactgtccgtggagagttggcgaccaacactttctcggacggcataaccgcgaggggcttagactggaaatcagatgcgccaagaggacaagagccaggggccagaataccccagtgggggacgcgccttggaggacggttcgcccagggtgggcttcagccctttcccagagtgctccgggcgtctggggactgaccggagcgcagggcgggggacacttacttcgttatccgcacgccttcctcgttggcatcagagccggacaaatcccaacccgcgccaggcaaagataaatgactcctggctcccccggcagctcagggggtctgggcgggggcggagagggaaggaagccgtcggccgccggaggtagagactgtggaggtcctcctcccggccccaagcgaatgagcccctgcggcccgagcagagagatacgcctcagagggacgactgatggggaaggatggtgggcaacgagtctgcgctaggcggtgagcctagcaccccagaggcccgagggtctggggctagtggggccgaccgttcaggagccgggtgggcgggaagggaattgccaaggtcggcccaggagctgcctcaggcgaggacggggagctttctgcactgggcttcccggggtaggagatgggcgtcgggtgtgggcactgcctgccctgggggaagaaagcgaggagataggtttcagagctgggggagtcgttggtgggagatctggtgtcccttcggcggccgcgggccgggggaccggggaagacggagggtcctgcggcctggagcaccaccctaccacaccaggcaacgccccccggggcgcccttcattcttttgcagagcccagaacttaataggtgggtccccttctgcaaccacgctgcgagagaatgactgccctgctaatctagtttacttgtagaaatcgactgtaaaccgggacaacaaggcaagggtgggggaagaaaaggaagcgccgaaggagccgccgctgcgtccccgcccccagctcggagctgccggggttggggccccgggtggcgctcccgacccgccgcgttttccttagggaaacaccgagtgaggcagaggatctcaggcccaaggtggctgcgaagagccccgaggcctcggcttggcgtcaatgtcccgccaccctcgagcccgggtcactgcccgggtcccggcccggagccccagcgtcctctcccgacagcgccaccgcgtgggctgaggccgaaaccttcggcgccggctctgccggtcgcgtcccggagccaacccttccgcgtcgcctgcagtccacgggttaaggatgtggcgggggatgggcaggtccctggcccagggtaccaccgggccactcaacacaaaaacgccctggcgcgtgcaaaatacgaacgcccacagtttgtcccaaccccttgaaatgaaaagtacacctggaaagcccaagatagcacccggtccgcaccccaaatttcaggcaggccagcaggcgtccagaaatccgctcccacccctcgtaggggcaggcaagctcaggcagccgggtgcaagggggcccaaaccgcagttgcctcccgaacgctttgaggctatgggcccacgccggtcttgaaccaagcggagagggcgaaaaagcccgctgcgggacccacggtcccagacacctactggagccagggacgaggggggcagtgtatccggcggcccaaactcgtaaggagtgggggccaacttagagggcttcccgagctggcgcctcgcctgttttctcggtatcacgaatcccctcggacaccgtttcagtccgtcaagaccttggcctccgggaaaggcccaagtgactgtgacggcggcgactcgggctcagttctcccccaccccgtggtgccttccctccccgccctacagccaagcccagaggaacagggcatcgcctcgcgcggtcccggagccacatccggacttgggaaccccgtgtcgggcttagaggacttcactgggcgggttggggtttattttcaataaattcagctgttcacatacacccccaccaccatttccacgcgcgcgcgcgcacacacacacacacacacacagagggacttgtcaactattgagacagcgacccagaaaggtgtaaattcacctggtgcccacccaattgcaaagctcccagacccacacaaaacactagcgagccctggaggtctgagacgccccgcgcccgactcacggcgcgaacaccagcgctccggccgggtcgcaggggccggtgcccagcgggccggggtctggcgagccaggcagcgggccggctgagctcctgcgccccgcggtcgcgtggcctactcgcctactcccttattattggctgggacctgttcctttccaaagtgtgatgcccggtgtcctaccctaggccacgcggagctctctcccggcgtgtcgggccctgcgcccctgcccagtggctcacctcggctcgctgcgcccgccttcgccccaagtgcccaggacggagcgaggggctgtgggtcggcgcagggacgctggctgctcacctccaggagccgacagaaggtgccttcggcgtcacgcgtccaaccctggggctgatttaaataactaataagctcagagaaattttacgaggggaacttttccttttagtatcaataaagcctagtaattgggtttgttggttacctaagctcgagttcgactttctcagtctctctctctctctctctttctcattcagaggcaacgttttcaaaaaccggcaattgcgtgtgcgtttggggtgtgcaagtgtgagtgtagatgtgtgaaagttatttgtttcagcagtccttgtctcgagagcaatcatcattgtagctttgagtgaagagttttcaaaggtgaactgttgttatttctgtcaacagaaaactgttgacaaccattcaagtctcacaatacaagtataatataagggagggtggaatatctaaagactgtcccgttggatatgacagaaagacatctgcagtgtttccctaatagtttgcattttaattaactttcattacattctgacttccactcaatatccgttgttttcagtaaagacttctatatgataaaacgttgtaatttttgttctggttttccaatcttcttgaaaaccagttcttaattgtaaggaatttttccacctgggaaccatgccgtaatttaaaaatataaaagacctttcatgaacaataactgcaaataacccatttgttagtgtctgcggagttgctggcacctatacaaagtctctgaaatataaaggcaatctaagaatgtttctctccaaccatagtgatatatacttttttcgtttttgttgtgtggaagttaaaaacacttttaaagttactttttagaaaagtgttgtgctaaaatttacctgaacttaaattccttatcaatgttagcctaacgaaatgaagagtatttctgaatcagattattgttagagtcatatgctaaatagtaaaggaaaagaaatgggaattaaagtttgcaaaccaagaccagggaaaagtcggctccagaagttaccaggaacccacccaaacctgtgcactcatatctcctgtatttacatattatagacaacttttcctttccacttttagctagaaaagtggtgggctccccttagttcgtctcgttttatgctgtaagacccaaagtctgctgagggctgcccctgccaggtaacttccggagacccggagttacttggagacagacccggccctttgcacattccaagtgaaggacgtctcgcgcattcttcccagagctaccacacacctaacctcttctggacacccaacagctggggcactggagcacctgaccctactcaagatcatcccccagcccttgccggcacttagggacagcagaatctgagctgtgggtgtacatactccccattttctgctttcccagaggatcacagacaacttttcttcccatctgctcccgctggactcctatgatcacccatcatccccagttgttgctatctctgagctcttggtgaccagcccttgtcccccaagctgaccaagttgagagagtacttgtcctcccagcactgtctctcagtatcaggaagttgagatcagtggcagggaaagatggaaggattggcaaggaaagtgcagggccaagtagagtagctcagagcctcagcaatgggcacctgtcctcccccaaacaacctgtggtctctccggctccctgcttttccaccattggtcccatcctgggctaccagcctccactgagctgctctgggaacttagggtgtctcacattacttccctgctatggcatattttggtttcagttgagctattttctgaagatgtggatactccagttttattctttttctgtctgtgtctcagtactcttttccttttttaagaatgttccccaagcctggcttttgccagaccctgtgccatctccccaagctctatttacaagaacaagaagtgatttgtctgtttatagcaggtttaattaagacagttatgcgccgtgaactctttgggcctcaatcaatgcacttagatttggaaactcagatagaatcacatcttacacgtgcggccccggctggccgcccaggctgaggacagagctattgttttctacatcagcctcactggaactgggcaagtcccctgcagaactggcaccccctgctcctcccaagagacctcaagtcaggtctcccggccagactcaggcctttctaatacaggcgtgaagggcgggacgcccagagccctcttgttggccggtggctaaggagccaggtggataacttctgcggattcggctttcaggctgctggagctctccccagcccgaggccttagcccagcgcaatcccttgtccagaccggccagtttccgcgtggcgaaaaagggggaggcaagtgtgtcttttccaaggagcttttatccaacagcctcccctccccccaactctcagccttaggtgccgggcttcagccgaagcgtttttcaaatttgtcatcattggaaacctcggacaagtggagtgtaaaattttgagggtttccaggtaggctctgacttcaggcattcaatgaaaggggaagagggctgagggcgggggagagagacaagcacagagggctccctgtagtcggcaggaattccctccctctgcagcccagctgcacccactagcacacactagtcttgccttctcccggctttggaagaatccccaccacattctttagctctcagaaaggagagggcagtcaggtcaaggtctttcagcatccctaccgcaatatacccctcccagccccctcaccaccaccacgttggcctaggacacaggaccccggggccagggcctcagtgactgcagcttatgccacctaatgcagaatggggtgtccctgcctccactgctcctctcggtctcagcatccaggtcctgaaacccctgcgattctggcctgggaagccagacttgccaccaacatcatggtatcacccataattgatccactcagttttcagtagatgtggaatccaacaagagtaacaccaccctccacgccccactcttttttctttctttctttctttctttttctttctctctctctctctcttttttttttttaagaatccaaggcacttgaaacattctgagtgtgcctgcagtagggtctcagaggagttgctctgaaagctgttgagagcagccacctttgctgtcactgagagcttggcagggtcagctctggtgggccgtttgcacccaggctctgatggcaccaggatggcttcctgcaacccggtaggaggactggggtgggtgggtccagtatttcgtttcttcctcttcctttttttttttttaatgtccctctttatttctattgaagactaacctcagtatcaaagggtgcacttgtttgtcctaaatggcttgtagctctttcctactctgccacaggacattagctctgggagcaccgcctggcagggccttcgctttgggcctaagcatccaactgaggcccagcaattccacctgtggggaatcttgcagtgaggtatttgtgcatcaggagtggggagtgagggagagagagctgggctggtgcagtatccactctcgcacctcctccctgagcggagctccagtatagactaagtgaatgaatccatgaatcagctccatagccgaggggtagaagaagcagccgtcttcgttaaatgggctgttggcagttgcggctgactgctctacccctcgcaggcccgcctctgggcaggcctgaggtggccctggagccccgccagcagcccccgcccctcaggccaagctctggccctggcaatctctgcactttgtcatcacgcccgagtatttgacattcgcaattatctgcaaataccctgatcagtttgtatatgaaacactttttttcctgccttaaggttggaatctggtaagtttcagacaagtggttgcagggggagatgacccaggggaccgtgcgggacagggccggtgaacccgattccgcgaggcgggcgtctcgaagggactggtctgcgtgcctcaccgggttccccagcctggctccgaggaaaggccgcgcggaggcgagaaagggcccacatctcgagtctccagtctctccttgaaaagagcaccccctaatcccggaggaagggagggtgaaggaggaggggagagcccactacaggcaaggcaggaaggttaatcattttgttaaccggaaagggtgctgccccgcctggccgtcgtcaccgagcgtgtcagtcacccgctctcgatttcgccgcagaattacctgctcaaagagccaccccaagaagccctcagctccgaggtcttcccgcccgtcgtctgcgggaagtaaacggcgtcctccctccaaagaagtggatgccccttcgactctcctccgccccccggcggttcctaaatctaggaaagccagccccggcatcgctcactactcctgcacctcagctctgggatacccgctcagtacagacagaccatcaaccaaaaaagaaaagaagaaaagaaaagtggtggtgggggtgggggtgggcagggagcgtaaagtagcgagatcacttatttgactcttctgttttcttaggaacctgatcctggcccccggcagagcataagggcccgaggccagggacctagaggccggaccaagttcgcgcgaggtgttcacagcctaggcgccccgggcttggcttcgtactctgcaacaagccaagctcccttgccacgagtatatcagcaacttcagaaataaacaccagcgaaaccccttcccacattagcttgttgctgtgctactgacactgggcttagtcgatgttcacacctattacatttttccggaaagtgggaggagcagggggtagagaaagctgtgtgtattgagggaaggggagatgtgtgcaacaccttccagaaaaatggggaggtagtttagaaagtttttctctgtaacagcacagcttctgagaaggcagagagaagaaagcagacaggaaacgaatcccttcctcctctcccctttacccccttccttcactccctagaccaagctggtcacccggctgggaatcaagattgtgtggctgggaagacaccagtctctgtgctcgggttcagcccagtcgggcaagaaagtctgggcagctggagaaggtcgtcacagtctcccgtggaatcttgttgcctgagagccccataacggaaagggctaagacgactcttccacacacaggtcgcagcccctgccgcggaggatccccaggaagatgctggggacgctctgagcatcggcctttctttacccccgactccctggagcttggtctcgggatgccaacttggggcacggaggcgacgggctgctccgaagctggagggtttctgcttgggtcagagggatcacgacctcagcagagccaggagaggttgggtgacacccactgcgtattgcacttgactcaaaactgccctcggcctgcggaagaggcgagggcaagaagcctggtggcgggtcaaaccttcaccctattattttctatcattttttatgcccatatatttgttaaatgtatggctgctatacaccaacagcttattctacaagaagtgcccccgaggaggattgggttaagctttgcaaatttggcttcccaggtaatgcgcttcattattctgctcccgacttacccaccacaccagtgggtacccggagcagcacccacttggcagaactgatgactgcttgggcccagcggagtgcgcattgcgctaacacgcgcacgggaattgcacccttgccggagcctccgcaccgtgcgcccttcaaagagctggcgaccccgctcacgtgtaagcaacctcccactttgaaactaattcgcacccgggtctttcaccccaaaggactttgctgcggacgctgctctgacccaagacgcgggagagaagtcccaaaggctacagccaggggctgggggactcctctgctcaccttagtccttgatttcgaaggccccaattaactatctgttgtgtcagaatcggcgagtgcaaagtagctgcgccccgctgacgcgctctctcctgggtccgggtatcccagggcatccggagctggggagggttgtgcggactacccaaggcacgcgcagataccgggcagggaagaagggctccgtgttccaaggatggtcgtttacctctcctgagatcagccctaatcccttggtaacttaagcgcctctgaactcggggagcgcttggtggggcgcctccctgcatccacccctacccctggctccttcccaggcccagcatctttcccaccattctcacccccaccacccccacggccccgcccgtttagaggcgtgcggtgggcacttggtttacagaaccggcgtttcagatgtttatttgcaactaatttcttgtgctggaaaatgcttgttacccgggcggagcgcttccgctctgcgcggtccggcccggcgggcggtagctcgctgatccctccggcgaagcctccaaggagcgggcggctgggagaggttgtgccacccgggaccaagccatcggcgctgctccggactcccggtagggggagccgccgcgggcgccaggccggattgtgttctggcctcggggcggccctgctgccagcggccgggactctcagcacagagctcgggaggactccacctgctctccagataaggcgccatgagcagagaagggaacagacggccaagctccctcctaattccccgttgttgcagagcaaagaagatgggggagaactaattatattctctaggtctaaatattgttgaaaaatttgtaggtgagatcacctcctttgcccatatccatatataatatatccattacatgtgtttgcccatatatatacgtatgccatatgtaaatatgtacgagtgtgtatgtatgtgtatagcagtggtttagaattagtctcagttccacaaattttgagcccttttaatattttaggtgacctaataccttctcactgtattttccaagtcacttatttccaagagttttaggtgatcccagcataggagctgagcataggagctcagatgagacttgccagttttgctgcagtaatgtcagcaaaagagtctctctctttctgactctatagacttaagtaagggtttacaggctttcattttaaggtatgactgatatttagagaacaagactaaaccaaggtcaaggggaaaacagttagactgtgaacctgcagaccactccactgcacccagtgtggccgtacacctgtgctgaacggccagagacttcctggtcaatactcccacagataaaagactgcaggatctgcttatacacaaatccatctttcgctgggaacccacaactcataacaactctcctaatgccaagtcatcaaggcctcttgaaagagaatcataaaaaacaaagaatttcaaacttggaaggaaacctaaagtttactggtgaggagcttgaactgagtagaagcaaagaatcatactccagatgagaaacgccccatgcactgagctgagactggaactctcctcttcttactctcagtccagtaagtttgactacagagcactcattatcattgtgattattatgttcccgcatattttgtcgttcttagttaggcatactcctttaacactattgtaataaaagcaaaatctggaagatctttaagagtgtag

SEQ ID NO: 533 - DNA, 7660 bp, Homo sapiens
  source 1..7660: mol_type = genomic DNA
caatgggcacctgtcctcccccaaacaacctgtggtctctccggctccctgcttttccaccattggtcccatcctgggctaccagcctccactgagctgctctgggaacttagggtgtctcacattacttccctgctatggcatattttggtttcagttgagctattttctgaagatgtggatactccagttttattctttttctgtctgtgtctcagtactcttttccttttttaagaatgttccccaagcctggcttttgccagaccctgtgccatctccccaagctctatttacaagaacaagaagtgatttgtctgtttatagcaggtttaattaagacagttatgcgccgtgaactctttgggcctcaatcaatgcacttagatttggaaactcagatagaatcacatcttacacgtgcggccccggctggccgcccaggctgaggacagagctattgttttctacatcagcctcactggaactgggcaagtcccctgcagaactggcaccccctgctcctcccaagagacctcaagtcaggtctcccggccagactcaggcctttctaatacaggcgtgaagggcgggacgcccagagccctcttgttggccggtggctaaggagccaggtggataacttctgcggattcggctttcaggctgctggagctctccccagcccgaggccttagcccagcgcaatcccttgtccagaccggccagtttccgcgtggcgaaaaagggggaggcaagtgtgtcttttccaaggagcttttatccaacagcctcccctccccccaactctcagccttaggtgccgggcttcagccgaagcgtttttcaaatttgtcatcattggaaacctcggacaagtggagtgtaaaattttgagggtttccaggtaggctctgacttcaggcattcaatgaaaggggaagagggctgagggcgggggagagagacaagcacagagggctccctgtagtcggcaggaattccctccctctgcagcccagctgcacccactagcacacactagtcttgccttctcccggctttggaagaatccccaccacattctttagctctcagaaaggagagggcagtcaggtcaaggtctttcagcatccctaccgcaatatacccctcccagccccctcaccaccaccacgttggcctaggacacaggaccccggggccagggcctcagtgactgcagcttatgccacctaatgcagaatggggtgtccctgcctccactgctcctctcggtctcagcatccaggtcctgaaacccctgcgattctggcctgggaagccagacttgccaccaacatcatggtatcacccataattgatccactcagttttcagtagatgtggaatccaacaagagtaacaccaccctccacgccccactcttttttctttctttctttctttctttttctttctctctctctctctcttttttttttttaagaatccaaggcacttgaaacattctgagtgtgcctgcagtagggtctcagaggagttgctctgaaagctgttgagagcagccacctttgctgtcactgagagcttggcagggtcagctctggtgggccgtttgcacccaggctctgatggcaccaggatggcttcctgcaacccggtaggaggactggggtgggtgggtccagtatttcgtttcttcctcttcctttttttttttttaatgtccctctttatttctattgaagactaacctcagtatcaaagggtgcacttgtttgtcctaaatggcttgtagctctttcctactctgccacaggacattagctctgggagcaccgcctggcagggccttcgctttgggcctaagcatccaactgaggcccagcaattccacctgtggggaatcttgcagtgaggtatttgtgcatcaggagtggggagtgagggagagagagctgggctggtgcagtatccactctcgcacctcctccctgagcggagctccagtatagactaagtgaatgaatccatgaatcagctccatagccgaggggtagaagaagcagccgtcttcgttaaatgggctgttggcagttgcggctgactgctctacccctcgcaggcccgcctctgggcaggcctgaggtggccctggagccccgccagcagcccccgcccctcaggccaagctctggccctggcaatctctgcactttgtcatcacgcccgagtatttgacattcgcaattatctgcaaataccctgatcagtttgtatatgaaacactttttttcctgccttaaggttggaatctggtaagtttcagacaagtggttgcagggggagatgacccaggggaccgtgcgggacagggccggtgaacccgattccgcgaggcgggcgtctcgaagggactggtctgcgtgcctcaccgggttccccagcctggctccgaggaaaggccgcgcggaggcgagaaagggcccacatctcgagtctccagtctctccttgaaaagagcaccccctaatcccggaggaagggagggtgaaggaggaggggagagcccactacaggcaaggcaggaaggttaatcattttgttaaccggaaagggtgctgccccgcctggccgtcgtcaccgagcgtgtcagtcacccgctctcgatttcgccgcagaattacctgctcaaagagccaccccaagaagccctcagctccgaggtcttcccgcccgtcgtctgcgggaagtaaacggcgtcctccctccaaagaagtggatgccccttcgactctcctccgccccccggcggttcctaaatctaggaaagccagccccggcatcgctcactactcctgcacctcagctctgggatacccgctcagtacagacagaccatcaaccaaaaaagaaaagaagaaaagaaaagtggtggtgggggtgggggtgggcagggagcgtaaagtagcgagatcacttatttgactcttctgttttcttaggaacctgatcctggcccccggcagagcataagggcccgaggccagggacctagaggccggaccaagttcgcgcgaggtgttcacagcctaggcgccccgggcttggcttcgtactctgcaacaagccaagctcccttgccacgagtatatcagcaacttcagaaataaacaccagcgaaaccccttcccacattagcttgttgctgtgctactgacactgggcttagtcgatgttcacacctattacatttttccggaaagtgggaggagcagggggtagagaaagctgtgtgtattgagggaaggggagatgtgtgcaacaccttccagaaaaatggggaggtagtttagaaagtttttctctgtaacagcacagcttctgagaaggcagagagaagaaagcagacaggaaacgaatcccttcctcctctcccctttacccccttccttcactccctagaccaagctggtcacccggctgggaatcaagattgtgtggctgggaagacaccagtctctgtgctcgggttcagcccagtcgggcaagaaagtctgggcagctggagaaggtcgtcacagtctcccgtggaatcttgttgcctgagagccccataacggaaagggctaagacgactcttccacacacaggtcgcagcccctgccgcggaggatccccaggaagatgctggggacgctctgagcatcggcctttctttacccccgactccctggagcttggtctcgggatgccaacttggggcacggaggcgacgggctgctccgaagctggagggtttctgcttgggtcagagggatcacgacctcagcagagccaggagaggttgggtgacacccactgcgtattgcacttgactcaaaactgccctcggcctgcggaagaggcgagggcaagaagcctggtggcgggtcaaaccttcaccctattattttctatcattttttatgcccatatatttgttaaatgtatggctgctatacaccaacagcttattctacaagaagtgcccccgaggaggattgggttaagctttgcaaatttggcttcccaggtaatgcgcttcattattctgctcccgacttacccaccacaccagtgggtacccggagcagcacccacttggcagaactgatgactgcttgggcccagcggagtgcgcattgcgctaacacgcgcacgggaattgcacccttgccggagcctccgcaccgtgcgcccttcaaagagctggcgaccccgctcacgtgtaagcaacctcccactttgaaactaattcgcacccgggtctttcaccccaaaggactttgctgcggacgctgctctgacccaagacgcgggagagaagtcccaaaggctacagccaggggctgggggactcctctgctcaccttagtccttgatttcgaaggccccaattaactatctgttgtgtcagaatcggcgagtgcaaagtagctgcgccccgctgacgcgctctctcctgggtccgggtatcccagggcatccggagctggggagggttgtgcggactacccaaggcacgcgcagataccgggcagggaagaagggctccgtgttccaaggatggtcgtttacctctcctgagatcagccctaatcccttggtaacttaagcgcctctgaactcggggagcgcttggtggggcgcctccctgcatccacccctacccctggctccttcccaggcccagcatctttcccaccattctcacccccaccacccccacggccccgcccgtttagaggcgtgcggtgggcacttggtttacagaaccggcgtttcagatgtttatttgcaactaatttcttgtgctggaaaatgcttgttacccgggcggagcgcttccgctctgcgcggtccggcccggcgggcggtagctcgctgatccctccggcgaagcctccaaggagcgggcggctgggagaggttgtgccacccgggaccaagccatcggcgctgctccggactcccggtagggggagccgccgcgggcgccaggccggattgtgttctggcctcggggcggccctgctgccagcggccgggactctcagcacagagctcgggaggactccacctgctctccagataaggcgccatgagcagagaagggaacagacggccaagctccctcctaattccccgttgttgcagagcaaagaagatgggggagaactaattatattctctaggtctaaatattgttgaaaaatttgtaggtgagatcacctcctttgcccatatccatatataatatatccattacatgtgtttgcccatatatatacgtatgccatatgtaaatatgtacgagtgtgtatgtatgtgtatagcagtggtttagaattagtctcagttccacaaattttgagcccttttaatattttaggtgacctaataccttctcactgtattttccaagtcacttatttccaagagttttaggtgatcccagcataggagctgagcataggagctcagatgagacttgccagttttgctgcagtaatgtcagcaaaagagtctctctctttctgactctatagacttaagtaagggtttacaggctttcattttaaggtatgactgatatttagagaacaagactaaaccaaggtcaaggggaaaacagttagactgtgaacctgcagaccactccactgcacccagtgtggccgtacacctgtgctgaacggccagagacttcctggtcaatactcccacagataaaagactgcaggatctgcttatacacaaatccatctttcgctgggaacccacaactcataacaactctcctaatgccaagtcatcaaggcctcttgaaagagaatcataaaaaacaaagaatttcaaacttggaaggaaacctaaagtttactggtgaggagcttgaactgagtagaagcaaagaatcatactccagatgagaaacgccccatgcactgagctgagactggaactctcctcttcttactctcagtccagtaagtttgactacagagcactcattatcattgtgattattatgttcccgcatattttgtcgttcttagttaggcatactcctttaacactattgtaataaaagcaaaatctggaagatctttaagagtgtagcagttgcttccaagggaggctgaattttaggaatgaagttacatataacattgacatatctgggggaaagactagaaaaatatagtttcattgcttttttgtgtgtttttgttcttgtttgagacggagtgtcactctgtcacccaggctggagtgcagttgtgctatcttggctcactgcaacctctgcctcctgggttcaagcgattctcctgcctcagcctcctaagtagctgggactacagacgcctgccaccatgcccagctaatttttgtatttttagtagagatggagtttcaccatattggccaggctggtctcgaactcctgacctcaggtgatccacctgcctcgacctctgaaagtgtgggattagaggcgtgagccaccatgcctggccagttttattgttttatccctgtttaataatgttggatatatgaggccaggcacagtggctcacgtctataatccctgcactttgggaggccaaggcaggtggatcacttgaggccaggagtttaagacaagctggccaacatggtgaaaccccgtctctgtctctgccaaaaatacaaaaattagccaggcgtggtggggggcacctgcaatcccagctactcaggaggttgtggcagaagaattgcttgaagggggaggttgcaattagattgtgccactgcactccagtctaggcaatagagcaagatcctgtctcaaagcaaaacaaaaaatattggatatatgcaaatatgtgattaaatgaatgaatatacaaacaaaacaatgaaaaaggtgggattgttggtattataaaagcattctcccaagttgtgtattttttctccaaaaaccagacctaacttagtccttaatttaagtgtttgtttatagatttttaaatatcacattttggtgtcatttttaagaaccaacaggaaggaatttctaaaataagatttgaaaaaaaaatctaataaaaaattgatttagcaaaagtagggaaatttttttgaatggaatattataggataagcccaaaatataccacccactgactttatcataaatcctgggatataaatgatattttatcatcctttctataattatcccctttttgttttttgataggatcaaaacaaaaattactatttacaaggtcaattcactattcctttttgtattcttgttcacaaaggcagagatacattaacaaatgaaagtgtctcagtctttttccgtaactaatgtccaatctttagcaaatggtgctgtgatgtcattgaaatgggtattggacaaagtaccaattgatttattgatttcccttcttcaaagtcgtttgggaattgaggagaagaatgaaaggcataggctggctgagatgtgcaatacttattctatcacacgcagacacacaaaaattacatttggctgataaaattgacaattcagaagcattgcttacagaaattcataatgagatga

SEQ ID NO: 534 - DNA, 69649 bp, Homo sapiens
  source 1..69649: mol_type = genomic DNA
ggaggcagccggggaagctcacacccttgtggcctcctggagacaggacagcttggggactgtggggggctgctggggacgctcacgtccatgtgcttcttttccagtgccatcaagtggaacttcaccaaggtaagggggctgtggggggtaggggaccagcttcccctggccacagccgtggcccagatgggcagcggacaggaagggcagcctcagccccttgcaggggtggccccacagtttggacaccgtctctccacagttcctcatcgacaagaacggctgcgtggtgaagcgctacggacccatggaggagcccctggtaggtcctctctagggagcccgcttgaggctcgggggcttgggaggtagctgccctaacccagctttcctccccgacaggtgatagagaaggacctgccccactatttctagctccacaagtgtgtggccccgcccgagcccctgcccacgcccttggagccttccaccggcactcatgacggcctgcctgcaaacctgctggtggggcagacccgaaaatccagcgtgcaccccgccggaggaaggtcccatggcctgctgggcttggctcggcgcccccacccctggctaccttgtgggaataaacagacaaattagcctgctggatctttctgcgtaggggcttggggggcccttttgccaggggcccctccatgtcagggccagttgccgtcagctgccaggctgggggtgccatggaggtggcgtgttgttgccccctcttcctccaggctcggggggctgtgctggctgcagtgctggggtgcagtgagatctgggcccgttggacacccagccctggctcttaatccgtgcagccccacctgctgtgcacaggcagggcctggtgtagtgccgagtcttggaggagataattctaagtggctgtgcttcctggccccgggccttaactgttaggaggtggctactggggcctcccctggccaggaagcagaagtgcagaggcccgaggaacagcgtggccctggtgctggggatgggttgggcacccacaccggcccttggggcctcacctggctggggggtgtgggggtggctgggtggttactgtttgcacagagtccctccgtgagggctggggatggacaggccaggaggggctggtagagcagtaccagccaccgttcatgggacccgggggctgtctggacacggcctggctgcccacctgcacagctagagggactgcagcctgccagggtggctgatcccagctgcccccactgggggtctgtggaatggacggtccatggcacctgccccagacactgggttgagaggtctgtctctcccagccctcgtcccctctcatccacatggggccagcacaggcagtgggcagaaaggcctggtaaccaggagagcctggggggatgcccacacacccctgcccttccctccctgtcccacaggctgaggagcagactccgtgggaagtaggcaaaaggcacatatatttaaaaaagtcctttacatatgtacatcagaacttgctataaatacatagaaaccgcaggcgccaccctgccagctccgcggcctggggcctgggagaggtgagcgggcaataacttaggggtcagggaagggctgggggagggagaattgcatatattagcaggggtctgccccacggagcccccgagacgcggggccctgagcacctggggtttcctgagtttctagctcttgggaccacccggtttcacggatttcaagggtttgggcccactgagcccttgtgggtgcccagtcccagagcagccacccggagccccttcctacttgggaggagaggcacagagagggccctgccacgccccggcccccagctgtcctgagtgggccccgccagggctgaccaggtgggggcccgggtcgggcgctgaaggcactgcggccagggcctagggctcctctgagcagtggtcaggggaccttggccctgctccccaccgctgctcctaggggagaaacggtccctgtgtcttggggcatgtttcgcctaaaggcgtgtcagagaggagcctgggcgccggggaagggtgggctgaactggatcacgctctgccgctcgggaccaccgcccgccgcgccccccgcccccgcgccctcccccagcgcgccctcggagggcggccccgcgtgcagcgagcgcagcatgtcctccagcacctccttgaagttgatgtcgcagccctggtgcgcgagggccgcagggtcggcctgggcgtcgggggtgcccagcggcacgacgccggggccggcgtccagggacagcggcgccgggaaagagaagtgcgggggcggcgggaaggcctcggccggggggctgtaggtgaggtccagcacctctccggggccgcaaggcagcgccagcgggcgcggggcgggcggggcggggcagcccagggcgggcgcctgcctgcgcttcacgtccgcatccatcagccgcagctcctgcagcacccggcgcacgcagccctcggggatcttgatgcctgcgggcagagcgtcggggtcagggccggcgctgggggctcgggccttcccggggcgcccgccgcccactcacccacttgcttcttcctgtccttggtcttcagccgcacgatctgcaggtagctgctgctgctgacgtcggccatgacggcggcgatgcggccccacacgcgcagcagcgcgccgcacagcatgtagtggtgccgcagccgcagcccctgcaggcagtccttaccctcctgcgccagccggcagtgccggttcctgcggacgagacgggtcgtctcggctcaggcgggtcccaggggcccgcaggctccccaggtgccctgagatctcccgcctcctctcagggtctcgggagcccccgatccccgcctgggtcgccgccatctgccggtttccccctggtccccggcccgccctcaccaggcgctgtggctgcagtgcgtcagcgacaaagcgtagccactctcccagggctccttggcctcctccgcggtgacctagggacacagggccgcatgagcctgggcggggtcagggccggcaacccgagcgaaagctgcgcccggcggccgcctacccggtggaacttgcggcggaggctgtccagggcctccagctggctctgccggccgatgttgggcttgtacaccgtgaagaactggccgcggttctgctccgccagcaggcagctgggcttgttaccgcggacctgcggaggggggcgttgaggccgcgccccggtccgccccccgcgggccctcctctgggggggtaaccccgcccgaccccaccttgtaggagaggtagaagccgtcataggggcccgtcagcgccagcgacttggcaaaggcgtcctcccacttcaggccgcggtccacgctgatctgccacggcacggggtgggggggtgtgagtgtggtgggggcggggtgggcagagtgtgaggggctgtggggcttcctgctgaccttgtagaagaccacctgcccgtcctgcgggtgcccgggagccaggaacacctgctggctctcctcgtagatctcctcgataccgggagcaaggtctaggggggcgggtggagggtaagtggtgtccaggcctgggactgtgggctggggccagggtcagtcccgtagccggggcgcaccctagagacgaccccccgagagcacaggagagggtgtcctggatcctggcctgacctggcccagcgtggggatggtgcacgtgggccccaacctggcaaccgctcaggtcctaggtaaccccgagcaggctgtgggggatcgtgggagcctgggggccgctcaggtcctatgtaaccccgagcaggctgtgggggatcgtgggagcctgggggccgctcagatcctaggtaaccccaagcaggctgtgaggagattgtaggagcctgggggctgctcaggtgctgggtgaccccaagcaggctgtgggggatcgtgggagcctggttggctgcggcactgctcatgagtgaagtagccatggcccggacccgaccctcatctggacacagggaagtggtcctgatggacaggcctggccccatgaggctggaagcacaggctcgccggcctttcgttcacaacaatgtagcaggtgccccgtgaagcctggggatgagcatggtgggcagcgtgcaccagcctgggcaccttccagagacgtgcacggtgatcccacgagccctgtgcctgcatccgcccagtctcacccagtaccctcgctcacccaggatgcatggcgcttccacgagccccttgcccacctaggccctcgccgtgctcacccacaatgcacggtgttcccacgagccccgagcccacctgggatgcccggcgttcccacgagcccctcgcccacccgggatgcacggtgttcccacgagcccctcgcccacccgggatgcccggtgttcccacgagccccgagcccacccaggatgcatggcgttcccacgagccccgcacccacacccacccacaccacaccccggcacctgtgctcacccaggatgcccatgtcgtatttgccctcccgcttgtccatctcgatgaggtggtcgaaggtgtctgagaagtactggaacagggcgttctgcttgtgcacctccagccccaggatgcggttcaggaacttggtgatggaacagtctggtaggggagggagccaagcctcaggctgcgctgggaatccctctccctgctttgctcaccacccgaggccaaggttgcatgagatgagagacaggagcgcctctgggcctgggtgtggggcactcacccttctccacgtccaggcagccattccgggactcccggccaccaatgcccacagacagcaggccctgcttcatgtctgcggggagaggggcctcacatgctggtcttcccacccctgcccctccctcgaagcccctagctccttttccagagaccagcagctccctggggggctggggagcagctgcagcctagggccagggccagggccaggagcggagccttttgcctgacttacaggagtgagaacagcatgttcttggggagtaaacccaaaccccaggcccctcagctgccctggaaacccacccggcagctgctgggggccgccttggctccctttgccttcacagccctctctgtccgtgtgtggggaggggtcactcaacacacaaccggcctacaaagcctgctgccccagctgctctggagcccagtgctctgcaacccctgcccctcccaggaagacccccaccagcccagcttaccccggaagaaggtggggacccctccagggtatccctggggcacaggcactttgttctcagtctggctcaggatggtggtgaggacacagtgcagggcccgggtgccatactagggggagaaggtgactcggggaggaggcccagggaggaggctggctttccctggacccctgcctccccagaaccccaccctcccctaggcccctggaccctgccctcccctagactcctagaccccacctcccccagctctcagccacctcctccccgggggtcctagactgggtcctcccccagacccctggatgccacctccctgagcccctagaagcccccttcccccctgggggtcctagacccggccctcctccagaccactgagccccacgttctccagcccccatctaccccctcccccaggctcttagatccggccctccctagacccctgcccctgccccgccccccaaccctgccttccctgcagtaccttgttctcaaagttgtacttgctgaggtcacgggactccgtggcgcggcggtctccgtgggtcagggccccctgccaggggtggggaggccatcagttggtcacctggggtctggcctctagcaccccacaaagctttggagagccttcctgggcctgtccctggttctcagccccacccccacctgctcaccagactctccaggcgcttggccacgatggaggcgaaccggcgctccccggccagctccgagatgaggaagacatactctggcgcggagacctggttggaccggtgggtgcggcctgggggcagagctgctctcagggcccggccaggcgggggcggggccgagaccatgttgggggcggggccaggcagcgctgggggcggggccggactcaccgaactgctggatggcgcggtcggcgctccacggcagctccaaggtcatgtgcacgcggcgccgctggttctggacacggcggtcggcttggagggagacacccgagctggaggcctccgagatgatggccacgagctagggggaaagaaggggccgggacacggttggtgcaaggcccgccccagcgttgccgccacctcctcacccactaggcccccgctccaggtcaccaggacgtcccggggcagcgagaggcctgcggggcgcggacaccacccgccacacggccactcgcgcccgcacctggcacacacacactccagaagtgcgcgggtccacagtccccggggacccttgggcccctctgtgcctcttgggtcccgtgggccgcgcccagtgcactgcagccccgcaccttctcgccgctcatgaagcgctgcttctccctgaggttcacgtggtcgatggacagaccctgctctgcccgcgactcgaaggccaccgtcccgtcgggcctggacaccacgcggcctttcctgccggtcatctgcagccgagacagggacaaaaccggccgtcagtgttgtggcctcgcaggagtctggccacccgtgtctcagcttccctatgtcctacagtggtcatgggctcccagctgtgcacgggaggtgggggtgctgggaaagggagggcgggactgctggacccaggcgatgtgtgcctgtccaaggcctggtattatcagccagccggcgccacgaagtgaaaaagtgaagctgggcgggggcagggagtaggaggccgcagaaccaggcccaggggcttgtgtcctggccctgggcaccccaaggggtgcgttcaggcaacgatctaagcagaggcctgcgcaggccaggctgggggatctggggcttagagggatggggcaggccgtccacaggaggtcgtggcctcccgggccgagctggacagcacgctgctgccccagggctccccaaacgccccctcctcgcagggccgcggagacgcagagtgaccagcaggggccaccagagctgcacacagcctgcgtgaagccccacccactgcccatgccccgcccaccacactccagctgccacgtcccacccacctccgccacccgctgggggccgcccagctggtcgatgagctcgtccagggtgttgactggcagttcccggcccagccgccgcactttgtccagcagatcctgcttcagccgctccacccgctccaggaccccggggccatgcgggtctctctgcaggaggcacaggggtcctagggaggaggtggagggtcagggcaggacatgttggctgccttctagggcccacctaactcaaggctggcccctggagggcaaggacaaggggcccggggcaaccctgagggacggcagggtggcggggaagcccggcaccgtggcccaggactgcttttctgcacttgtctccctgagaccagctggggcgagactaagcctcctgtcgcggaccaaacactgtgacctcactgcctccacaggggtagggactgcccagccccaagccccagctctgcctctgaccagtggtataacccctgacctcccctctctgggcctcagtttcccccatctgtaaagtgggcaccatagcagcagctgggctcaggtgggctggactgagggctacaacctggggtgggtggtgaccgccaggaggccgggggagcctcaggctggaatcctgacccagaggtggctgctcagcctggactggaatcctgacccacaggtggctggccagcctgggcaagccctcaccccggtcgtcactggggagcccgactgcatcaacgatgacaacgtcgtcatccaccagggactcgggggaggagttgaagtcgctgtccaggccagggtccgactccgtgctgctgtcgtcactgatgcggatgacgcccgctgtctcgcacgccagccggggggctttggccccgcgtccccgaggtcgccctgcagggaaggacagggtcaccgagggccagaccgcagcaaggtggaggagcaggtggaggagacgcagcaggacagagcaaggccagtggtccgagctggggaggtccatccgagaaccccctgcctctgggcaagcagctcagctgttctccagggacgccctctagggaaccccgtgccctgtggccaggagggtacggtgtggggggccatattttatttatttattttcttttgagacggagtcttactctgtcgccaggctggagaacggtggcatctcactgcactctctgcctcctggattcaagcgattctcctgcctcagcctcctgagtaggtgggattacaggcgcccaccaccacgcctggctaatcttttgtattttagtagagatggggtttcaccatgttggccaggatggtgtcgatctcctgacctcgtgatccacctgcctcagcctcccaaagtgctgggattataggcgtgaaccaccacgcctggcttatttatttatttttgagatggagtttcactctgttgcccaggctggagtgcagtggtgcgatctcagctcactgcaacctccacctcccgggttcaagcaattcccctgcctcagcctcctgagcagctggtattacaagcatgcaccaccacacctggctaatttttctatttttagtagagatggagtttcaccatgttggccaggctggtctcaaactcctggcctcaggtgatttgcccgcctcagccttccaaagtgctgggattacaacaggcgtgacccactgcacctagccaatattttatttttattaatttttttgagacaagagttttttctgtcacccaagttggagtgcagtggcatgatctcggctcactgcaatctccacctctcaggttcaagcgattcccctgcctcagcctcccaagtagctgggattataggcgtccaccaccacgcccagctaatttttgtatttttagtagagacagggtctcaccatgttggccaggctggtcttaaactcctgacctcaggtgatccacccgcctcggcctcccaaagtgctgggattacaggcgtgagccaccacgcccagccaacgggacaatattaataaacccatatccaacgtcctttcaggcctggccagtatggtggacacgcggggtgcctggggaggccacacaccagacttcgacaggcagctctgggcttccctgtgacagaagcctgggggttatcaatgggctccccaagggaccgtggagaccctgaaaacggaaggtgggaggggtctcgctcagcacccgcgtccgtgtcccgccccccgggtctcgctcggcacccacgtctgtgtccttcaggctgtctgttgcttcctcttccctaagcgttccatggcagggtccacgcaagacctgccactggcagcggagccttgagcctgcctggcacggacaggacctgcatttggctgagtggacgggggagtgggggaagcagggagcgaccagccagcccccggggggagaaagcagaggggcaggggtgggtggggccatggggggcagggcttacgtttccgcttgctgcccgctcctctgtcccgctttctcttggtggacggaaagtgcttctgaattagcgacaggaacacgcctctgaaagtgagacgcggagtttattctcacacgaggagctgaggccaggcggggttgctctccaggagctggacgcacccctgggtccctgtgggggtcccggacaggaccgggcctgggcagagggtctcctgtgtggagtgggctggggaggactgggggctgcctgtgagctctcctctggcctcctggtgtcacagggccacctcggccaccaggcttcccccgctctgaggaatgtggccggatatgatgatggctcccaggacaggggcagggggcagggtgaaggggtagctgggggcattggggagctccgacccccaggcaatggggggatctaggggggctgctgtgaccctcccggggcattctcaaccaacaggggagaggctggggcttcagacagctgggagggccagcccctaaaatccacagcccccttgttaaaacggcacagatgcaggaagcctccttctgagacccctggagaccatgtcccaaaccttccaggcccaccatgcctggggtccacctccaagcctctgctttagacctggagcagcggtgaaggcctctgtggctgaggctgggggcccagcaaagcccaccccagcacctcctgctgctggggccaaggggcagggtcaggccacaggtggccacagagaggggtggccatgagcgcaggaagcccacagtcctgtccccaccgtgacacttactcagcggccgagacgaagcagttgaggtgcccatcgttctcccccagcacctcccgcgtgcgcgcctcgcccgtggactgcagcccgatgaccacgcactgtgggacggcagaggactgtgagccaccagccctgctgtggggcctctgtggggccagaacctgccaggcctggggtgatggccacatccctcactctgctgctgtgctcgcctccccaggaggggccacggcccccctacaacacacactgctgggtgggggtctgccggctgcctgtctcgggatggtgagctgcccactgtgtggtcacactccgctgttctgacaccctggctggctctgattggaagacggacatccgggcgtctctcacccaccagggtgcagcccccgcccacgtctggggaggggccaggaaggacctggaagaagagcagcctccgcccctgcaggcccggccgccctcagccctcgaaggccgcagccgctcaccttgtctcgcgccagctcctctcgggccagctccaccagccggcgcaccttggctgcgatgcacagatacttgaagaagcgctggtgtgccgaccagaactggccccacagggacttgcgcgactccaggccgatccagtcggccgcctgctggaacacgttcagggcctcggcccactgcaatgacacgtcacaaggcgcccctgagctgtggctcctggctcccgacccgggccccggcccacctgccgccagccctgggcaaggcatccccacgccaggtggaatttagggcaggatgggggtgctgggggtgtgcactgtaagaggcactgcctctacctgtacggcaaaaacctgaaaaaccaaaacactcgtggtggggaagccgtgctgcaaactgcacagactccgcgcccgcggcaaacaggctcagctccttccaagaacacagggtgctcgcagccacgcctctcttgctttggaccagggtctcacccaggtgtgatcctgtccaggggacactgggcatgtctggggctggctgtggtggtcaggtttgggggctggtcccggcatgactgggtgggctgggttagggtggctgggactctggccacggatgctgctccataccccaaagtgctcaggacggccccaccccggagagcaacccggccctgggggttacgggagatgctggttgtgtcacctaaagaaacgagtgaagaggctgggtgtggtggctcacgcctgtaatcacagcactttgggaggctgaggcggtcagatcgcctgagctcaggagtttgagaccaaccagcctgaccaacatggagaaatcctgtctctaccaaaaatataaaattggccgggctggtggcacatgcctgtaaccccagctacgcgggaggctgaggcaggagaattgcttgaatctggtaggcggaggttgcggtgagccaagatcgtgccattgcactccagcctgggcaacaagagtggaaaccccgtctcaaaaaataaaaaaaaaaaaccatcgaacatacagggctgttgggcgtgagggggagaaaacaggacctgtccaaacatggagggaacgaccaagccacatggcccacagcaatgtggatgctgaacacggctaccaactgccagctgtgggccaggacctgggggcaaagggcttgggcaccacaggaaggggggcggtggtttggtcccatccctcgttatcacagccacataaaaaccccagtgatggccgggcacgtggctcacgcctgtcatcccagcactgtgggaggccgaggcgggcagatcacttgcggtcaggagtttgaaaccaacctggccaacatggagaaacaccgttctctaccaaaaaatacacaaaattagctgggtgtggaggcgggcacctgtaactccagctactcgagaggctgaggggggagaatcgcttaaacccaagaggcagaggttgcagtgaactgagatcacaccacagcactccagcctagatgacagcacgagactgtctcaaaaaaacaacaaaaaaaaaaccccaggacaggacagggcgggccgtcacctgatgacgcctgtggcatctgcaaggccacgggggagcaatttcacccgggaaacgcacaggggtccccgggtcgggtgcgcaggctcaccagcagggccgcgcggttgtagacgcactcgaaggctggggccagcgggatctcctcgatgcggaaggtgacgccggagaagctgagctggcgtgcgatgtacatgccgctgaccttcatgtccatggccacgatctccatggcgccaacgcccctgcggatggacacagcccccgtgagcacggccagagcccgtggggatggagccactcggagcgcgaggcagagccagtcgcagagagggcggggtcggcaggagcagagccctggcggccactgaggcagttggcagctgagcctggcggggacggggcaggaagggctgcggaggggctggcttccctgggagtgctgggcagcccgaggcagtgaaacgagcgacccacattcagcacctctgggtgctggggaagcacacgtggcagtgccaggccttgggctgatgggcctgaggcctcctccccaccccccgccgcccctccacgtgggtgagaagggcactcacctcttctcgatggcgtgcaggaactcctcaaagttccggaagggtgtgccctcgccccagatacccaagcggctcatgtagatcatgttccgaggctcagaggcacctgtggggggaagctgccgtcagctccccaacccgggagggcccagaggccgcgtcaggggacgactaagttgggaccacccgacgaggggccctgcggggttggagccatgggcctgaagagagccagcgtggccttgggacaggcgcagaggtgccccagtgtccgaggaggagcagggtgcagacggaggctgagtacgcgtgtgggataccccttcgcggggacagccaggcagaaagacgctgctgcgggtgggtcacgtgggatccgcaccgccccacctgtggcgctggcgtagaccacgcgggccaggggcagcttgttctgcaggtctagcacagccttgcccatcttggtggagccggcattcttggctttgtgacactcgtcgaacacgatctgaggcacacgtgggttaaggagtattctgaaggacgggggcgaccccaggagcccaggtcctgaccacccaagaccccaccttcctggtggggggcaaacgcctgtgcggctgagaactccacgagggaagcccaggtcggagtggcagccggctaccatggggggcgggcgggcaggcggcccccacacgaccattagatgggtgtggcctgggatggctcctcccagactctaaacaacacacaccgaggatggggcctccggcgaggaagggtgggatccctaaaccatgatatcgcaggacgttgccatcggaggaggatacctggaacctgttttcttttttgtttgtttttttgagacagggtcttgctctgtcacccacgctggagtgcagtgatacaatgtcagctcactgcaacctctgcctctcagattcaagtgattctcctgcttcagcctcccaaggagctgggactacaggtgtgtgccaccaccacaaccggctaatttttgtagttttggtagagacggggttggccgtttggttggccagataatctcaaactcctgacctcaagtgacctgcctgcctcagcctcccaaagtgctgggattacaggtgtgagccgtgcccagccctaattctttgtttttttttgagacgaagtctcgctctgtcactaggctggaatgcagcggcgcgatctcagctcactgcaacctccgactccctggttcaagcgattctcctgcctcagcctcctgagtagctgggattacaagtgtgcgccaccacgcccgggtaatttttgtattttcagtagagacggggtttcaccatattggtcaagacagtctggaactctttttttttttagatgagacacagtctcgctctgtcgcctgggctggagagcagtggggcaatctcggctcactgccacctctgcctcctgggttcaagcgattctcctgcctcagcctcccgggtagctgggattacaggtgcgcaccaccacgcccagctaacttttgtatttttagtacagacgtggtttcaccatgttgtccaggtggtctcgaactcctgacctcgtgattcgcctgcctcggcctcccaaagtgctgggattacaagcgtgagccactgcacccggccaggttcttaatattttaagacgaaagaaagccaagttccaggaaagcagtctgaggaaggaaaactgggagaatacaaattaaacggccggccctgccgccacgtagcagctcagcgaggtatgatctcagggttatcgctatttcgtagattgttgcacatagattgttcagccgggtgcgaagacaccagcagtctcccgttctgtttctggccagtctgaatgttctgtgtctcggcgttaactgaacagcaaagccatggccatgtcctgtgcatgaagtggatgctgcaggccaacgtccctcccttatctgagcctgtgctcccaacaccccaacacccaaggtgcaccctgcagggccgagcaccagggctgagcctggccaaggggtgccctgccgtgcctttgctgctaactgtcctgggtctcctgtgggggagcccctccgaaccgcagcctgccgacgagagccctgggatgctggggagtgaactgtgcccaccacactatcagctggggttggcaccttcctgacttggggagcagctcagtggccaccctctgcccacggcatcatggcaaacatcaggaccacatctatggtcactcatcccacttatcagaaccaagaaaccaagccggagccctgtggtgaatgatgatggtcacttgtgtggtacccacagggccagcctcccaggaccagaaaagtcttctatccggagtcctaaaccctgagcaaagctgggggctgggtggccacatccagggtagtgagctccagtggcctccagcccttccccagccccacccctccgctcctaccctctcccatcctgccctcctctcccctgactcccacccctcctctcccactcctccatcctccttttccctccgaccccctaatccagccctcccctcccgattgcccccagcaggatacgacgccctcgaaggcctccccacaccagtccaggatctgccggaggcgagtgcggtgctggccgccggcctggctctccccaatcagggcggagtaggtggcgaagaggacgccctctgaggtagtggtgtcaccgtacttgatctggggatgcacagaacaggtgtggaatggggccccggctcagcaggctctggacctgggtctccctatctgtaagggtgctgggcagagcctgccctggctgctggcccacccagctgagcagcccccactttgcagggcacggtccccaccttgccccctactttgccgagcacagcccctaccttgctgagcgcgtgcaccgcgatgcccgtggcttcgatgtcccgcaggtcgcgctccgcatcgtacttgaggtcgttggagacgctgaacctgcggggtgggggcgtcaggcgcgcccacccttccccctcgccccccgcttccgccccccacccccgctcccgccccctgccccaggcagggcctcaccacaatgctttcttccggccgcgcaggtggttctccaggatgactccggccaccgtccggcctttgcccacgccggccccatcgccgatgagaaagcccgcgcgctgcccgctggggagcaggacctcgtgttgctgttgccggagagcaggcgtcagggcctgggggtgctggcccggcccctccccaggggcctcgcggacacaggctgggctgggttggggacatgcggtcacctggcaggcgtaggtgatggcctctagctgcagggcagacagggccccgctgtccgagggcagggccagggtgtaggtgatgtctgggggtgggacgctggacagtgtgctggtctccaccacgcggtctgggtgctgcttcccgatcttggctggaggagcaaggacggagggcaaggtaaagggtatggccaaggggtgaccagggccggttatggcacgctgggcgggtctggggcgtggccagagctggcggggcagtttgggggcgtggccaggtcccgttgggcgggtcatgggcgtggccaggaatgcctgggtggaggagtggtcagggctggccgggtcgggggtgtggccgcggcctgctgggttggttgggggcgtggccagcggcttgcaggaggggcaaatgcataaaaatcctcccagtgcctctgaggttcctttccacttctcccctctgcgaaccccggttttgtataagcctggattgtagaacctgtccccgggctctccggccctccctgaagcttcacattccctctgtgggctgtgcgggcggtggtcacctgcagggtctcggtcccacaaaagggtttgaacctgtcccagggctgggtgcagccgggccactcacacttggacggcacgtagtcggcgtaggtctctgtgtgccccagctcctccgcctcctcctcctcagcctcgtcctcctcctctggctggctctgcacactctgctcctgcgtgcgtggcgggagctcagcggagactgcaggcctgagcggccgcgggcactgggctcccccaggggcaggggccaggctgaccatgggcagctgagtgacccaggggtgggagacggctctgtctgcccctgcagcaaggtgctcccccagggcctccatctcctcagctataaaatgggcactcccagcttctaggccagccaagcgctccccacaatggagatgcctgtgctgagccctctccttaggtcccatgagagggcaggggagggagctctcggctgggcccagctcacctggtagctgacgagaagcggggtgctgtgggagggcagaaagtcctcgaagcctgcaaacggcctgctgagctggaacagctggaaggggagcaggatgtcagcccgggccagacgggacaggtcacagctggtgggccctcgcagcctggccaccagagggaggctccccactgccccgtcctcgcctccccatcctcgctccccagggccctgggtcttgctctcctgctgttctcagggtgaccctggtgcctcccaagcctccccagtgggcacctccctggggcctaaggctcgctcctcctggccagcacctggctgccttctcactgatggccagtgtgcctgcctggagtgcccgggaggaaggtgcccggctagttctgacagacaacacagcttggtcccgcgggagctgccaggaaggctgtggacaggggtctgacaggagagacccactgtgtgccagccccatgcagtgcaggaggccctcgggggcctgggagacaaggggttgggagctccctgtcgagggggaagaggagacagaggcagtgggggcgggcgggcctgggccttgtccctcacccgatggctcccagcacacagggtgggtggcccagggcagccctgcactctccaagaacccccgtgggtgcagtccctgaggcccctcgagggcagcacctcctctgtgagagatggggcaaggatgcctgccactgtagtgaccagagaacacatcccactgcggccccaccctggggagaaggactgcccggagcctcatgcagattcaccagggtgggcagtgacactgtcctcggggagctgaccccaggccttggcagacaggtgtgctgggcctctggatgagtctgtggcccacccaggggtctccgaactgactgggcgtgtaaagcctgtgaacgggtgggtcggggggtggtgtggcccgtcgtcatgcccactgtccagacgccaacactgagacagtgtggaccccgggacggatggctgggggatggtagggtccaaactagggtctgtgtgattctggaatatatccactcttaaaaagcaaaaatcctaacagtaatacgagccataaaaaacgtaagcatggtcagggtacagtggctcacacccgtaaatcccagcactttgggaggccaaggcctcccagagtggaggtcaggatttcgagaccagcctggccagcatgctgaaaccccgtctctactaaagatacaaaaaaaaaaaaattagccaggtgtggtggtgggcgcctgtaatctcagctgatcaggaggctgaggcaggagaatcgcttaaacccaggaggcagaggttgcagtgagctgagatcacgccattgtactccagcctgggtgacagggcgagactccatctcaaaaaaaaaaaaaaaaaaaaagtgagcgtgggccgggcatggtggctcacgcctgtaatcccagcacttcgggaggccaagataggtggatcacctgaggttgggagttcaagaccagcctgaccaaaatggataaaccccatctctactaaaaatacaaaattagccaggcacgatggtacatgcctgtaatctcagctactagggaggctgaggaggcaggagaatctcttgaacctgggaggtggagggtgcagtgagctgagatcgcaccactgcactccagcctgggcgacaagagcgagagactctgtcttaaaaaaagaaaaaaaaaagtgtgaagaattggaaaggggagaatcccgccgggtgcgtggctcaggcctgtgggaggcagaggcagaacgggcgagatcttttggggccagggttccagaccagcctggacaacatgataaaatcctatctctacaaaaaatacaaaaattagccaggcgtggtgtcgtgtgtctatggacccagctactcgagaggctgaggcaggaggatcgctttaacccagaaggtcgaggctgaaatgggctgaggttgcgccaccacactccagcctgggcgacagagtgagatcccgtctcaaaataaataagtaaataaataaataagagcatctcttctagacccggtcccccccttgaactccaacgtcctgagacgggtgaggtttccgcccaagcctgcctgagcccgggccgggttctcggcagtgtgtgggagccaccaggctagtgatgctaatgaactgagtccacagcttctgcattttctaacactaggaacactcctgagggtttttaaagaaagtggaagcgtggcacaggaaggttagaaacctatactcagttgccctctccttttttttttaagttaacaaaacacaaaaaaacagacgccacgcaggttcctggaaggctgagtcaccattcccggtggggctggcgggcattgggtttcagatgccctcgtgccggccacagcaggccggtcaggccctggcttctttcctcacgccctgctgaggacctgggagctagctgggagggcacgggccccgggctgggtgaaatgctctgctgggcccttgtgccagagggaccaagcctgagccgcccaccatggctgcggggtgccctgatgcttcctgagccgcccaccgtgagccacccaccgtggctgcggggtgccctgatgcttcctgcctgggcccccaagcccgtgagttctgctgcccgggttgccccttcctgagggcccgggagagcggcctatgggtgtgagcccaccactgtgccgggagcgtgcggaggctggcatgggccctcaccggaaggcgctcagtcccagagacatgtccaacgtctgctcccaaagtctagaagcttctctcgtggacaggcccggattggggaagggacttgccaggcctggctcccagccatgcctccctcaccagacacctccactgagtcgcactggggcacggctagaggctaggcccgaagaacctgggggccctgctgccctacaacccctgctctaggcctggcccacccaggtccttcaggagcttcttggaggcaaaccccagcccctcagcccccacggacaatgtccagctccccaccctgggacaggatccaccaacctcgccctctcagctccccactagcggggacacggccactgctgacccaggcaccatggggctggatgccaccacaggtgctgttcctctgcctggacagccacattgcctgggcccgctgggcgctgcctctccagggggcccttcctgaccacgcttctctgtcccgtcaccttcctgtgcttctctagaccagggactccccgggtgcggtggacacggggcagggtccctctcaggtggggccataatgggcactgcagggcgctgggcagcatcctggccccccccaactccatgccaggagcaccgcccagatgtggtagccacagatgtcctggacgtcgccttctcctattcaggacacaagaggaccctcaactaaccacctcatccatggccacagatggcgccgacagtgacaggcacagccattggcacgcagagtgggggagactgagacctcactggaccgtgtgggtcccgggctggggaggccacgctggtgggtcggggctggctgggggcaccgggcgcactgaccttatcgtgggtggagggggcagggttatcgtcccagatggtggacacctggttgaggctgtcagccggcaggaagtcgggcgtgtccacgatgtccgacagggagtccacggacgaggagaagatggagatgttggagaagtcctcaaaataggaggagtcctggaagacaaggccaggcccggtgagggtggtacgggagacaccaaggcccctccacgcactggagcacgtggggatgggagacaccacggccctccacacactggagcatgtgggaatgggagacaccacggccctcccaggttcaagcaattctcctgcctcatcctcccaagtagcagggattacaggtgtgcgccaccatgcccagctaatttttttgtatttttactagggacggggtttcaccatgttggccagcctggttttgaactcctgacctcaagtgatctgcctgcttcggcatccaaaagtgttgggattacaggcgtgagccaccatgtgacagagcgagagagtgagactccgtctcaaaaaagaaaaaaataaacaagcaatgggtgagaaacaccaaccctcagggccacgcaggacggcgtctgacttctgcagcacctgaagggcagcaatgctgcaggaactctgagcagctcgggtctggggtgagcctggtgccatgccctgtgccggaggcaggggcgggggcagccacgcccagaggtggggctcgccatggggatgacacacacacacgcgctgcccagtgaaggagatgtatgtacatcatttcatttttttttttttgagacggattcttacactgtcgcccgggctggagtgcaatggtgtgatctcgtctcactgcaccctctgcctcccaggtgcaagcgattctcctgcctcagcctcccgagtagctgggattacaggcacgtgccaccacgcccagctaatttttgtatttttagtagagacggggtttcaccgtgttggtcaggctggtctcgaactcctgacctcaggtgatccatccaccttggcctcccaaagtgctgggattacaggcgtgagccaccgtgtccggccacatgtgatgtctcacgcctgtaatcccagcacttggaggccaaggtggaagattgcttgagtccaggagttcaagattcgcctggacaatatggcaaaaccccatttctactaaaaatacaaaaattagctgggtgtggtggtgcatgcccgtagtcccagctactcggggggctgaggcgggaggatcacctgagcccagaggggtcaaggctgcagtgagctgttactgcacaactacattccagcctgggtgacagagcaagactctgtctcaaaaaaaaaaaaaatagactgggcatggtagctcacgcctgtaaccccagcactttgagaagccaaggtgggcagatcacctgaggtcaggagttcaagaccagcctgaccaatatggtaaaaccctgtctttactaaaaacacaaaaattagctgggcatggtggtgcgtgcctgtaatcctagctactcgagaggctggggcaggagaactgcttgaactcaggaggcagaggctgcagtgggctgagatcgtgccattgcactccagtctgggtgacacagggagactccatctcaagaaaaacaaacaaagaaaaaaaccaggcatgtcaagggggcgctgtctctccctggaagctgtgggttccgtccccctcaccttgctcagctttgcccactgcccaccctgtcagacccaagcacctgggcactgatcactagggaccttcaggaacctgcccccaaacagagacccccgggacagaggtgtccatgctgcccgcctgaggcccagagccaggtagggtgcagcaccccccaccccaggagggtaggagcagtccacctcccagagcctctggaggccccgatcggcagggttggggagcattcatcccactgaggcccacgagggccctccggacactgcccacccaggctgcagagggcctggtcacgctgacctgtggcccggaccctccgtggaagcatttcccgggcaaggtcaggggctcctgagttggtcaaggccccagccaggagcgggggtgagttgctatcgggcccagaaccgcccaggccttggtggtgcagggagcgcaggcagagcggaggagagctccccaaacccaaatgcgtgggtcacacggccagtccttccccggagctcagcgtggacagagggaagggacctcaggcagagacacctgccccacgccctcaccaggtgcccttggcccaagaagacaggacaacagggtcctcccgcccagggtcctccacccaaaactcctgccccagtctgaggaaacaccagcccgactactccagggcatccacaccacccgaccagccccaggaccgcccaacgcatctgaaacacgggcctctgagaaaccatcacagcccagaggggcctgaggagacgcctaaacaccacgtggggtcctgggcaggaaaggacatgggggaaactgaggcaatccaagcaaagcgtgggcctcaggagttaacggtggcgtacggatgttggttcatcagccgtgacagccacagacgggagatagaacagcagggagcccgggagtgggtgcacggggactctctgcactgtccctgcagcttttctgtcattctaaaacagtttgaaaagttaaagtcaagtcgggcaggggggagctcacgtctgctactcaggaggctgaggcaggaggatccgttgagcccaggtggtcgaggctgcagtgagctataattgcgccactgcacgccagcctgggagacagagcgagaccctatctcaaaaaaaaagttaaaagtcaagcagggcgtagtggctcatgcctgtaatcctactgttttagagccaaggtgaaagaatcacttgagcccaggagttcaagaccagcctgggcaacacagcaagactccatgtctacagaacgtttaaaaattagctgggcatggcagcatgtgcctgcagtcccagctactcaggaggctgaggtgggaggattgcttcaacccagttggtggaggttgcagggagccgagatcgtgccactgcacaccagcctgggtgacagagcaagtccctgtcacaaaaacaaataaataaaagtgaaagtctaataatgagggagtgcttgcagctttcaggcttcaagaacgcagcctcgaggccccgccctgctccccgtccggtccttcccagcacaggacaccccaccaggtgcatgagccctcgaagccttcacttctagcaggtgccctcagcgattagggacagagggagacggggttcccagggctggccctgttcacatgtgggaagctgaacagagccaggccagctccccccacagtggctccgtcctctgcccacatctggatttgactcctagcagccaccagctcacctcagagacagcctaagtcccacccgcgcctgtgtgtccctccacagcccctccaggccggcccaggctcctgcatccttcaccacatgacccacccaccctccagcctcagctcagcggacccagtgcctccccagggaaccgggcccctctgcagtctgtagtgagggcaagcaccaaggcccctcaagggtgacacttgcatccctccccgccagcccccagttctggggccccagggagggccggggctgcccgctgtggttcttgtctctgtagcatttcaggagccctgggctgaggtggggagctgggaggacctggctgggaggacctggctctgcccgcttcaaaagcagcagacacagctcctcctgccctgggcagccaactccagacctgactccagaactgactccagacctgatgtgctgccgctgccctgtgctccaggacccatggggagccacagagccacagggatttgccggcctgcgccaccagagccagccctgaccaggcccacccagcctccgctccctacaagagccccataagacacccagagcccctccacctgaggcttctccagaggaaagccacagctctgggtcctaccccaggggcagaaggagggggacgcagccctcccgacagccactgccactgtcactgagggcccccgtccgggcagggctgagcccgacccccccactccgctcgggtcccccagcctacgcacagggcgccgctcccagcccgaagtcttaaatctctgcctcggaaccttccggcagattccctctcactgccagaagagacggacggggcggggtggggatttttttagatcctggcggcctcggactctaggatgagatgccggctgctccggcagggggcccggccgtcctgaatggggtcccacctcccagacccctgcccccgagggcctcgcccgccccgggaagggagtgttaccttgttcagagcctcaaactgcagccacagctgcagctgggacatggtcccggcgctcggggggccaggggtcccccaggaagcgctgcccgggagcggctccctcatgaccgcggcagcagccccagcattgggtcggccggggcggacgggggcggctctccgcccggctgcatttgcatgtcggtttagtcaccgccgccggcgcctacttcctctaaggccggggctgactttcaggaaatgatgccggccccgtaagtcagggcaattaccggcagtgcgaggagaattactgtacggggcggatctcccacaggcgctgtcaacacgcaaccccacccgtgccccgccgcaggaccagccccctttggggcacccggcggacgtgcagaatgcccaggtgggcatgggcctcggtctccccagactgcagggagctgggttccgttccacggggaccagctgctgttcctggtgcccccaaaccacaggcagggaaactgcggccaagaccgcctcccttcacccagcaccccacgcatgccaagcgcacctcaggccctgctgcgcccccctggggctctccccaccccacccctgcaggctgaggtccccgagaagcccctgccgccgaagcaaagtcccctccctgctctttccctgctgtccgtgcccagggggttcagcgggccccgtggcctcccttgatctggggctggcggagggagagctgagcctgggcccctcctctccaggctctggccagacccggcctcggccccctgggcaggaacaagtggtagcgtcctgggaaaagaacgttctcgctttggtagaaaaccaagtgtcaatgatgcacttgctggggcaaccccgggccgcgagcccgcccgcggccacactcttgcccgcactgtgaggaccctggcgcatcacaggggcctagacaccgcggggcagacacctgatgggacctcacattgggccacaggcggtcattctcggtgtccttggaggagctggggaggccccagggccagagggggtgggaggacggccgggctgtggagaggacgggccccatctgcctgtactcagcgactgacggggcagaggccgcattgcccacgagaccgcggccgagaccgcgcaggtggccacggctcctcctctgtgaggggaggaagggcccggccctgtggccaggggccctgggaaagaaggaaaccgccccgagaggccaggggagcccgtggctgggccggagggctcgggacagttctgggcttgtaagactcccgccagggctctgaggggagagtgggaccagggggccctcaaaccctgtgcactccgccccctcgggctcaccctgttctagaccctgaggccctgtgccagccccactggggccccgcgaccaggcaccgcagcagcggaggctggtgcagactgtcgcccacaccccttgccacgacccatcacctcctggaggctgggcgacaacacgggtccgtgccgctggggcgaggggcccgcctgccaggcaccccgcccgccaatggaaaacaaccaatggggaagaaacccacggagccgctcaatccggcagccaatcacagccaccgctcaacctagcagccaatcacagccaccgctcaacccagtagccaatcacagccaccgctcaacccagcagccaatcacagccactcccagagacagctccacaccagctccacgcaaaaaacccacaaccacaagcgctgctgaggacgcggggcagtggcctgggaaccatcctgcagctcctcaaaagaggcgaatggggagtaacaacccagcagctgcactcccacgtgccatcaggaggacccacagctcacaaaagcctgaacctacagctcaggagtggacccacagcccacaggacccacagctcaagggtggactcacagctcacaggacccatagctcatgggtggacccacagctcataggcgcctggacccacagctcatgggtggacccacagcccataggacccacagctcacgggtggactcacagctcacgggtggactcacagctcacgggtggactcacagctcacaggtggacccacagctcacaggacctacagctcacgggtggactcacagctcataggcacctggacccacagctcacgggtggactcacagctcacaggacctacagctcacgggtggacccacagctcccgggtggaccctcagctcccaggtggacccacagctcatgacagcctggctcctgcagcgcagtcaccacggaggaacagggccagcacagtgaggccgtccacacactggaacacgacccagccatgaaaaggagcaaggctctgacccaagccacagcacggatgcaccttgaggacctcacactcagtgaaagacgccaaacacagaaggccacgcagtgtgtgaggccatttctatgaaatgtcctgtcctgaacaggaatccacacagacaggaaaagcattcaggttatcagggggtggggatgggctggggagtgacagctgatgggaacggggcttcctgtgggatgatggaatgttctggaactagacagaggtggtggttgcacaactctgtgaatatacttttttaaagtgtggatttgggcccggcacggtggcttacgcctgtaatcccagcactttgggaggccgaggtgggtggatcacgaggtcaggagttcaagaccagcctggccagcatggtgaaaccccgtctctactaaaaatacaaaaattagccaggtgtggtggtgggtacctgcaatcccagctactcgggaggctgaggcaggagaattgcttgaacccgggaggcagaggttacagtgagctgaaatcgtgccactgcactctagcctgggcaacagagcaagactctgtctcaaaaaaaaaaaaaaaaaaaaaaaaggtggatttggccgagcgtagtggctcacacctgccatcccggcactttgggaagctgaggtgggcaaacagcttgagcccaggaagttcaagaccagcctgggcaacatagtgagatcccatctccacaaaaaatacaaaaaccagctgcgcatggtggcgggcacctgtggtcccagctgctcaggaggccatggcaggagaatcacttgagctagagaggtggaagctgcagtaagttatgatcacaccactgcactccagcctgggcaacagagcaaaatactgtctcaaataaataaagtggattttgtggtatgtgaattttgtctcagtttttaaaagacctggaaagcaacgaaacagaaagaacaagcacagactccgacttgctccccaggccccaatgtgacagcacagcccagggtccctggagcaggtcagactgaggataggggtgcgccgcctagggacctgctgggcactaccccacccacctccggcgccccgcgcccagtcctgggctcccgtggcccggtctctccctccgcctctgtccagggtgcacccctcactgaccagtcccgcagcaacgctgaccgagggctccgtgtaagcctggctgaatgcccgctgcctcagccctcacaggaaccctgccctgcattacagggagggaaacaggctacggggatgggaggggctcctcctggagggggctggggggcagacagaagaggcttccaggtggtcgtggggcacaggtggcacttcctagacactgccagtctttggtggctgggagaagggcccctcagcaggcctggtcactagagtgccccgtgcagagctgaactgtgtccccaaaatggtgtgatcatgtcctggcacctggaagctgtgtgtgtggccttatttgggaatccggtccttgcagatgtgagtggttaaaaaaaaaaaggccgcactggccgagcgggtgttctgtgcctggtgtcctcattcgaaggagacacagtcccggggaggaggccacgggacacagaagcagagatcccagccctgcggccacagccaggggatgcccggatcccccagatgctggaggggccggaaggagcgcggccctgtccgcaccttgactttggacttccaggctccagggctgggaggggacagagtcctggcctttgaagctgtgtgtgctgcttcctcacagcagccctgggaggctggcacggctccccaggaaactgggctcccttctgtcagggttccggccaggtgcctggtatgggccctggggccgccgcctcagtgtcttctggtgctgcagccgggcagggccgaaccctggcgcacagcttcctgctgagtctccctctctaaggctgtctgtgggcggctctgccggcccctcctgcacctgcccaggccctgggcggaggctcctcctcccgggggggctgtggcctcagcacagaccaggggacagaaggtggctcttcttggccttggctgggtgtgaaccaaagacttcctgtaagaaatccccctctccctctccctccttcgctccctcatctctctccctcttttttgcccaatgccagtaactgtgggggctccgtggtgccggatgggccgaggcatctgacccctgctgaaacgcatctgcagaacagtcaatgctgcctgcctccctgcctgaaagcagccagagtttgcaaagcgcttttctgagccgtgagctcatcctgagcttcccagaagcccccgggctgccaggcagagagtgttgttaccggacagctgcgttcccaatggtccctgcagccccatggggacccgggatggatgcccggcaggtggagaggtcctcacaggacaggtggtgggcaagggggcagcacctggggaatggggatgggctgtgggtgccgagagccccaggagcccagcagagacgcaagggatctgggtgatgtcaggaagggtgaaggagcacccccaccccaggaacaggcggcaagggatgggcgaggggcagtgaggcgagcaggacctggggaatgtcctgtgtaggggcacaggctggggagaggcttgggctggggtgcggttgggggaggctggcactggggtgcagtggaggagaggctcgggctggggtacagtggggggaggctcaggctggggtgaggctcgggccggggtgcggtggggggaggctcgggccggggtgcggtggggggaggctcgggccggggtgcggtggggggaggctcgggccggggtgcagtggggggaggctcgggccggggtgcggtgaggggaggctcgggccggggtgcggttgggggaggctggcactggggtgcagtggaggagaggctcgggctggggtgcagtggggggaggctcgggctgggggggtgaggctcgggctggggtgcggtggggggaggttcgggctggggtgcggtggggggaggctcgggctggggtgcggtggggggaggctcgggctggggtgcggtggggggaggctcgggctggggtgcagtggggggaggctcgggctggggtgcagtggggggaggctcgggctggggtgcagtggggggaggctcaggctggggggaggctcgggctggggtgcggtggggggaggctcgggctggggtgcggtggggggaggctcgggctggggtgcggtggggggaggctcgggctggggtgcagtggggggaggctcaggctggggggaggctcgggctggggtgcggtggggggaggttcgggctggggtgcggtggggggaggctcgggctggggtgcggtggggggaggctcgggctggggtgcggtggggggaggctcgggctggggtgcagtggggggaggctcgggctggggtgcagtggggggaggctcaggctggggggaggctcgggctggggtgcggtggggggaggctcgggctggggtgcggtggggggaggctcgggctggggtgcggtggggggaggctcgggctggggtgcggtggggggaggctcgggctggggtgcagtggggggaggctcaggctggggggaggctcgggctggggtgcggtggggggaggctcgggctggggtgtggtggggaggagaccagaagaggcaccaggggctgccctgggggacactcaccccacacagaaacaggtgccggagagcctgggggtggggccgcgaggctgggctgggcctggagcaggggacccacgggaggctctgggcacagagggtgggctgcagcagcaagggccccttatcctcgagcaggaacccaacaccccccagccagacccagtcatgcctggaacacacagacatggacctgcatatggacgctgctaacagcgattcacagctgctgtcaacccatacctactcctgggtatgagcccaagagaaacgaaaacgtgtccactgggaagtttgcacccgtgctcacggcggcacaactcacgacggccacgggtggaagcagcacaagcgtccatcacggacacacagacagacacagtggggccctccacgcctccatcacagacagacacagtggggccctccacgcctccatcacagacggacacagtggggccctccacgcctccatcacagacagacacagttggtcctccacgcctccatcacggacagacacagtggggccctccacgcctccatcacggacagacacagttggtcctccacgcctccatcacggacagacacagtggggccctccatgcgtccatcacggacagacacagtgggtcctccacgcgtccatcacagacagacacagtggggccctccacaggtccatcacggacacatggacagacacagtgggcccctccacgcgtccatcacagacagacactgtggtacctggtacctccacgcgtctatcatgaacaaaaacagtgggtcctccacgcgtccatcatgaacaaaaacagtgggtcctgcatgcgtccatcatggacaaacaaggtggggccccttcatgtgccggaacacggctcagccataatcaggagccaggctctgacccagccatagctcggatgtaccttgaggacatcacactcagtgagagacgccagaggcaggaggccatgcagcgtgtgatcccatttctatgaaatgtgcaggacaggccaagccacagagacgggaaggggatgcgtgggcgccggggcaggggagggatggggagtgacagctgacggggacagggcctcctctagggggacaatgatctggaattagaattacatggtgatggctgaacagctctggactttgtaacagccacagcatcgttcacttagaaatggggacttttctgtcacgtgaattgagtctcacgtgacagaaaaggggcggggcgtggtggctcgcacctgtaatcccgacactttgggaggccgaggcggatggatcacctgagatcacgagtttgagaccaccctggccaacgtggtgaaaccccgtctctactaaaaatacaaaaatcagctgggcgcggtggcgcacacctgtaatcccagctactcgggaggctgaggcaggagaatcacttgaaccaggcaagcagaggctgcagtgagctgagatcgtgccattgcactccagcctgggagacagagtgagactttgtctcaaaaataaataaatatggtgcgcgtctgtaatcccagctactcaggaggctgagacaggagaatcgcttgaacctgggaggcagagtttgccatgagccgagatagatcacaccattgcactccagcttagacaccaaaagcaaaactccatctcaaaacaaaacaaaaaactagagaaaaacagagacagaaaagaaagaaagaaaataaagaagaaatgcaggccgggcgcggtggctcacgcctgtaatcccaatgctttgggaggctgaggtgggtggatcacaaggtcaggagattgagaccagcctggctaacacggtgaaaccccgtgtccactaaaaaacacaaaaaattagctgggcgtggtggtgggcacctgtagtcccagctactcgggaggctgaggcgggagaatggcatgaacccaggaggcgttggttgcagtgagccgaggtcacgccactgcactccagcctgggcgacagagcgagatttcatctcaaaaaaaaaaaaaaagcagcagcaacacagagccacgtgtccacagaaccacggttcacctgcacaccgcggcagggggccccaccaggacacacggggctgagccatcacccaccagggacattgagcctgatggcttcgcgccaacctggagacggaaggctgagcagaagtgaggggggcccttcctccgggccagggtggctggagggccgggcaaggcacacacgtgacaccgcgggagccccgcagcccacggtggatgccagcagcggcatcctggcgcagcgtgagccccaggggtgggggtgggggtggccagggagcaggcagagagcggggaaggggtgggggtcccacacagacccagccgtcagcaggagaaggcacacggaaaacagacggacgcagcagggatgcccgcaggcagctcccacgggcagaggctgctgaccccgccttgggcaggaccagcctctgctcagccttgggtcttcccccaggctgagagaaacaggaaatggatggtgaaggaaccccgtccccgccaagcggccaaagttaccagcatcagcacaacacgcgcaacgccaggcactccggtccacgccgcactgtacatggtgccgtctgagggattcctccatccagtcaggagacaaccccagacaaaaccaacggagaggcactctggagaagacacaccctggagaagacacaccctggagaagacgcaccccggagaagacgcaccccggagaagaggcgccccggagaagaggcactccggagaagacgcgccccggagaacacgcgccccggagaagaggcaccctggagaactgcctcttcgggggcaagcgcagaggctgctgactcccccggtccaacaagctcttagtttttgcaatttttttgtaatttttttttttttagacagagtcttgctctgtcacccaggctcgaatgcagtggcgcaatctcggctccctgcaacctctgcttcccgagttcaagtgattctcctgcctcagcctcctgagtagctgggattacaggtgcccgccaccatgctcagctaatttttgtatttgtagtagagacggggtttcgccacgttggccaggatggtctcaaactcctaagctcaggtgatctgcccgccttggccccccaaagtgctggggttacaagcttgagcactgcgcctgacctgtaaatctaatttttaattttgtatagagatgaggtctcattatgttgcccaggctggatccacgtgtccttcatggacaaacacagtgggcccctccacgcgtccatcacggacaaacacagtggggccctccacgcatccatcacggacacacggacaaacacaatgggcctcccactgggaactcccagactcaagcgatcctcatgcctcagtcaaatagatgggacccaaatactgggactacaggcttgcaccaccatgcccgactaattttttctattttttatacagatagggtctcactatgttgcgcaggctggtctcaaacccctgggctcaaacaatcctcccgccttggcctcccaaagtgctgggatcacaggcgtgagccaccgtgcccagtcctgactcaaacatgacctcctgcattcccaggggcagaatctcccaggcacagtggccctactcggagtctgtgaagtgaagaccaccaggtgagccatgatcaaccctcccctcaatgacctccctcacgatcaaccctcccctcaatggcctccctcctcatgatcaaccctcactcagtgacctccctcatgatcaaccctccctcaatgacctccctccccacgatcaatcctcactcaatgacctccctccccatgatcaaccctcactcaatgacctccctcatgatcaaccctccctcaatgacctccctcacgatcaaccctcccctcaatgacctccctccccacaatcaatctgcccctcagtggcctccctccccaggccgtgaaggctctccagcagaaccaacagtgctgcggagtccactggccccaggcactgcccgggtccacggctcatctgctttctcctattgctctggctgccaagaaactcagggctcaggtgtatcaatagttaccaggcggatcgcctgaggtcaggagttcgagaccagcctggccaatatggtgaaaccccgtctctactaaaaatacaaaaattagccaggcgtggtggcgcacacctataatcccagctactcgggaggctgaggcagaagaatggctcacacttgggaggcagaggttgcagtgagccgagattgcaccactgcactccagcctgggtgacagagcgagactccgtctcaaaaaacaataggccaggtgcggtggctcatgcctgtaatcccagcactttgggagacgggcagatcacctgaggtcaggagttcgagaccatcctggccaacatggcgaaatcccatctctactaaaaatataaaaattagccgggcgtggtggtgggtgcctgtagtcccagctacttggtaggctgaggcaggagaatcgcttgaacccgccaggcagaggttgcagttacccaagatggcgccactacactccagcctgggcaagagtaagagtcggtctccagaaaaaaaagtcatgactagctgtctcgttatggcctgtggggttttacattcaccctcactcccagcccaggaacaggttctccctaccaatccctccaggtttatacaacagcaggaaacatttgcagggaatgcacacatgccacaggtcacacgatggctttgaacggtgcctccgtttcccctcgctcccgtgaaaagctactgtcaacctcatggctccaacaagctgaatatggtggctcacgcctgtaatccccatgctttggtaggctcaggcaggagaatcgcttgagcccagaagtttgagaccagcctaggcaacacagtgagacctcatttctacaaaacataaaaaattatctgggtgtggtggtgtgtccttatggtcccagctactggggaagctgaggtgggagcttgagcccaggaggtggaggctgcagtgagccgagattgcaccgctgcactccaggctgaacaacagagccagaccctgtctctaaaaataaaaattaaaaaaatatataaatgaaacacacacttatcctctcacagtctggagggcagaacttgtaacatcaagggtgggcagggcaggtccctcccgggggctccaggggaaaacccagttcctgcctttccagtgtccagaggcacccgcatcccttggcttggggccccttcttcccccttcacggccagagcgcaggctcttcccgtctctctctggctctcaccctcccgcctcctctcatgagggccctgtgaggacactgggtctccaggtcacccaggaagctctcccgtctcgggtccatcactcagtcccatctgcaggtccctgtgaggacactgggcctccaggtcacccaggaagctcttccgtcttgggtccatcactcagtcccatctgcaggtcccgtctgccatgagaggcgacacggcggcaggtcctggggatcaggacggggacgtcttggaggctgtaaccgtgtggccagcacatttcctcaggtctgagtcgggagcagaggcttccgtggctggctgggctgcgctggggggcacggcgcaaagggcctcgaacaccaggctcaggtctgggctccttcctggctccgcagaaccacgcggcccagcccacaggcctgggctgactcatacccgtcccgtcccacacttggcaccgcgggaccacgcatcccgtcccacactcgacaccacagaaccttgcggcccagcccacaggactgagctgacccacacccgtcccatcccacactcagcactgggggaccacgcggcccggcccacacttggcaccggggtcagacttcctccaaatgaagttctgctgctttaacagggagatttgggtccaagctgccccacatacggacgctggagcatgaggcggctgtaggcagggtgggcagggagccgggcgggcggtgctcacagaaccagcacagtggccccgagggctccgggctgaacagatgcagcagcaattgttcaggaggggaggagcaggagaattcatgagacagagatggagacggagacagagacagagacatggagagagacagagacagggagacagagacgcagagacatagagacatagagacagaggcagagagggaaacagacgaagacagagagggcgacagagacagaggcagagagggaaacagacgaagacagagagggcgacagagacagagagggaaacagacacagaggcagagagggagacaaagagacaggtggagagggagacagagagacagaggcagagacaaagagacagagacagagagggagacagagagacagagacagagagggagacagagagacaggggcagagacaagcagagagggagacacagacagagacagagagggagacagagagacagaggcggagatggagacagagacagagagacagagacagagagggagacagagacaaagagggagacagagacagagactgagagggagacagagagatggagcatagagggagacagagacagaggcagagagagagacagaggcagagaggaagacagaggcagagagggaggcagagacagagagggagataggcagagagagattgagagggagggagacagagagagagactaggagcagggggaagagggagagagagagacagagaaaagaaagagacaggccgggcacggtggctcacgcctgtaatcccagcactttgggaggctgaggcgggcggatcaccacaggtcaggagtttgagaccagcctgaccaacatggagaaaccctgtctctaccaaaaaaaaaaaaaaaaaaattagccaggcatggtggtgcatgcctgtggtctcagctgctcgggaggctgaggcaggaaaatcgcttgaacctgggaagcggaggttgcagtgagccaagatcgtgccattgcactccagcctgagcaacaagagcaaaactctgtctcaaaaaaaaaaaaaaagaaagaaagaaaggaaagagagaaggaacacacagaaagaggcagagaaggggtgaaagagaagaagggggcggggcaaggacaggctgacccagggctggggctggtaggaaggcagtggcggtgaggaaggagccactgccatcagtcgcaccccgggctcctcccctgtgcgtcccctgaagggtggggcacagatgccagctctggacaggcgcctcccctgcctcagtttccttctgtgtccggctggcatggcgcagcagcttgccacaccttggccaggaccagatcacatgggggtccagggctactgcgggtgaggacagagcccctgtgcgcacctcgctgacctcagccccaagatgagcaggggcgcccccctcccctgaacacagctggtaggccaatttccaggccacacactgggggctacaggacaggaatccaccctcttcccgtcccagggcccgggagtctgaggccaaggtgtctcagggccttgctccctcccacagctctgacccacctcttccagccctggggctccaggagaaactgacctgtggccacaccgccccagccccggcctccagcgtggcgccagctcccaatctctcctgtctcttctgaggacccttgtgctggatttcagagctacctcatctcatcttgatccctacccaatgacatccaaaaagaccctactttccaggaaggtcccctcacagactctactggggaggcggacttgacggacgcggtcaccccagcacagactcagggtccggctggctttgccccgctctgctacggccctgagtggggaaaactgggcccggggtccacccggcgagctgtttgcagggcctgggtctgggtgagccctgggacctgaattggctccattctgctgcagccacacctgaccgcttctctctggatctggccggcttgcgcccatccccccaacagctctgaggcccaggcagatctcacatgcccattacacaggggaagcggaggcttgggggagctgagcaccaggtgaccctcgctccccggcaggccctggatgtggtccggcccagcagcagcccctggccccgggtcccacacggaggctgtggtatccgaaccgtcccagggaagccgatctctgtggcactgggtgctccagagctgccgagaggaagctggggcactgggaaccccttggggaaggctgtgagggtgggggtggggtccgcctgatgccgcagtgggaggctgtgagggtgggggtggggtccgcctgatgccgaagggggaggctgggagggtgggggtggggtccgcctgatgccgcagtgggaggctgggagcctccccgcgaccctggggagaaggaggtggaaagttctgttcctttggtatgtgagttccgttttcaggtggctgctaaggggttgggactccaatgtgcagggtgtctggacccgcctagagggagggccgtgggggcaaaggctgccaagggcatctctcccagcaccgccctccccgcaactccctctgtggcattgcccagatgctcgcagggaccccaagggctgggcggggctcactgctgacacgaagggccagtcactggctcttccccaaaaccaagccacatctctgggctcctactgccccaccgtaaaccctgcggccgaggggccaagccgaggtcactgagtcccaggcaggcctgagcgagagaggtcgcagggcagctggaggggcggcccagactccaccctgccccccacggcgcggtgagctcctggggctcctacctgagcaaagtcgcaggtctttggtggcaagctggaggcggtggccacgggggcatagctggtgtctgggcagggctggctgccgaggaaggaggcggagctcatgaacgggctggagggagatgggggggggggaggtgagatggggtgctcaacccactccctcagtaacacacctgcacccccatggccgcagccagaggcccctcgaggccccactggagtgtgcccagcccggcaggacccatggccccgctgcacatacagaggggcctccaggggggtggtggtcaagcctggggctgccctcccacccccactggacacagcccggcagagctcctacggaacagccgcctggtgggcggggggacatccagggccaccatcccgccctccccgctccatcagcaggactcggctaagggttcattctggcgattcagaaccccagcctggccatccctcccccacacacaggccccttgacccacacctcactcccgcctcgaaggaggagagcgctacgggcagaaacccaggatcaccgtcctccagggagggctcaggtcggaaccccccgccctgtcaccctgaggatggcaaaggacacagcaaggagaaggtcctgggggccccccgcccaggggcgcctctctccagatgatcccaggagtaaaatgtggctggcagggaggcttctctgcccttccccactccggcccccttggccagctcctgcgcttgggagaggggtggccgccgtccccagggcctccttccctcccgccaggctccccaggctctccctccagaagcttctctccagcagggctggcagcaggtccaggtctctgcccagtgggagccggaggccttgggttggaggcggccctgggcagacctgctcccagggcagggaccgcctgggggccactctcctcctgcatagaaaggtttgcaaacaccagcaggaaagaagcatccactccactcccgggccacaaacagctgctccacaatctcctggagtctcccaaggctctggctatacctgctcccaagccctttgcacagcctgctcgactgctcgcctggccaactcctaccccccctgcagaacccagcccagctgctgccctctgtgggaaaagtgcccttcccaccctccttcacccaccccagaaaacctcccgccccttcccaccctccttcaccccagaaaacctcccgccccttcccaccctccttcaccccagaaaacctcccgccccttcccaccctccttcaccccagaaaacctcccgccccttcccaccctccttcaccccagaaaacctcccgccccttcccaccctccttcaccccagaaaacctcccgccccttcccatcctccttcaccccagaaaacctcccgccccttcccaccctccttcaccccagaaaacctcccgccccttcccaccctccttcaccccagaaaacctcccgccccttcccaccctccttcaccccagaaaacctcccgccccttcccaccctccttcaccccagaaaacctcccgccccttcccaccctccttcaccccagaaaacctcccgccccttcccaccctccttcaccccagaaaacctcccgccccttcccaccctccttcaccccagaaaacctcccgccccttcccaccctccttcaccccagaaaacctcccgccccttcccaccctccttcaccccagaaaacctcccgccccttcccatcctggtgtcacctccacaggaggcccccctggcccatagcccacacctccccgccctctaccaagctgggctctcgaggagagggaagccatggatcacaaaacagcgttccacaaacaggggtctcagcctggacctggcccgtggggtggagccttccaggaccacgtgcacaccaccctccaaacccctcaacaagactttgggccctcgcgccctgcacccagaactccgtttgtaactgtgacttcagaatgagcaagcctgggggccaggcggggagggtcccggtactcaccggctgtcgctggagaaggcagggtatggcggcagcgagaaggtgttccagtaggggcagtgcagcatggcgctctagaagagacagcgggcatcagtgagtgggaagcagaggacctgcggtgcagcccggctaagccctccgggcagggtgacaggccgagaggctagggaggccccgcagtcagggtcccatcccgcccctgctggtatctcctggggagtcatttaactgccccgtgcctcagtttccccacctgcacaagaccccacccaaggcttgtggtgtggtctgaaggcactgaaccacccgcgtgaagggctcagcacaggtcttgctctaccagcagccccatgtgcaggcccgcagcccgggagtctgcatctcacacaagacctgggggtgccgctggccccgggaccctgcttggaggccccattctaggaggtggaggatcggaccgtttgcgtgagggagacgcgcacccgctgcctgtggtggagggtgggtgtcgggggctcctcgggcagggcctggggcaggcgagggcctcacaccacctccaggcccctcggacaagctgatgtgcccgggaagctcaggctgctgcgggacggggccctgacttctcagaagctgcacggggctggggtgcggggagcctgctttgggaaatggtgaccagtggcctggaggctcagcccgaggtcagtggaggcgtgagtggctccaggttggccgaatctctggtgggtctgactccaggccaggcttacccaacaccctcgccaggagccgatgtccccaccccatggttctctgggaaaacctcactatgcctgcccttgggaatgagagcggcttgaggcacacggcaggccccaaaacctgaggatggggagcacacggggcagcagcgggcccaagggcggcagcgggcccagggtcagcacctgcggcttcgggggcagggctgtggacacctcgtgccctgcagaatgggcacccctcagcagggcccccacctgcacagggccaacctcacctgcagcagagagaccctgccgtcacagacgcccccacagtcacgggggagaccctgccgtcacggatgcccccacggtcacgggggagaccctgccgtcacggacgcccccacggtcacgggggagaccctgccgtcacggacgcccccgtggtcatgggggagacaccaccagccgggggcatcatcctgcttatcccagcaggactgggggccacgctggcttccagaacagggttgggggttcgcctgcttccctgagtcccccagtgacctctcccaggcccacgtgagccctgctcctctatgaggccctgatgcaattccctggggctcggccacctctgcccctcattcacctcacactggctgggaaccagcccggatggccgggggccactttctgtacccgcaggtgctgggtgggggattccaggacccccgacagcctcgagataggcaaagccctcggggtgaccgctgccccgctcctccagcttttgcataaaataagtttatcagcaaaagcccacagctcctcccctgcacagaggccggcagcctgggcaccctgagctcctgcacccgtgagaagaccccgtgcaagtggcttgcaggaagccgggccaccagccacaggggctccagagcccgggtctcctgatccttcccctcctcctgcccttttgggaagagagaaagccagccctggagagaaacaggaacttcccaaggccatgtggcacatccggaacattctggaacagaactctgactccagaccaacccagcctcctcagatgagctggagtccgtctcaggcacacacggcgccttgggccaggctgggcagggccacggccagggaactgcagctgcaggaagggggcggggggcttggggtcgcagggcgggaggatccaggggtccctggctcacccaacatgctccacctgtacccaggccaggctaggggatgggacggggggaaagtcctgactgcctctatccccctagtctcctccctcccacagcccatggctcctctgagacctgccatccacacacacccgagtcccaccccacaggggtgccatgggcatggcaggccaatcagagtcttccctgggaccttctctggcagccagagggtgtggcttcacctttagatggcaggtcctagcacataattggtccagagatgggcacctgaccctgcccagacaatcagagcctgcctggtgattttctttcctttccttattttgagacggagtctcactctgtcacccaggctgaagtgcagtggcacgatcgtggctcactgcaacctccacctcccgagttcaagcgattctcctgtctcagcctcatgcgtagctgggattacaggcgcccgccaccacgcccagctaacttttgtatttttagtagagatgggatttcatcatgttggccaggccggtctcgaactcctgaccccaagcaatgtgcccacctcggcctcccagagtgctgggatttcaggcgtgaaccattgtgctggccggtgtatttttatttctaattgaatactctgggcactggaagaggctgggctgtgcgtgtgcgaactcagtcgaccctgcccagaggtgtccatgacgtacccgaatgtgacggaacccggaacagggagggtgggatgagcctcacacacgggatggggagcaaagccggttacgcgcacgggtgcgccccggcctgagccctgtggctggtgtccagtgcccccgccgggttccagccctgtcgcattccccgactgtcactgctaacaccttcctgctcccgctcggatccttgaagatggctcctctgtctccacatcccataattcgcttaattatttccccaccgtagagcctctggggagattccagtttcctgccactataaatagtgccgctctgtcttcccctccctcctggattagtccccagggtgtgtttccgagatagaattcttggatcggaacaagctcctggcgggtttcgggggatggagctgttccggtggggatgtggcttggccagtcccctttatggtggcccaggaggctgaccgacggccggtactcgagctccaccggggcagctgtgaggatccagcctcaaccccaagggactcaggaactagggagggggacaggaggggtctgggccgcaacagggaccctgctacgagaggggtaccctggccccagctcagagccccctctggacggtcagaacatggcaggaagctgcccaaagccctctgaggatggactgccgaggggtgtctgtgatgttcgccccacaggccaacctgggtgttgggctagggagtacccaggagaccctggagtcctggagcaggtcctgctgcttgataggagagggcagcccctctgtctccaggtaaatccccaggcagggccgggcgcggtggctcacgcctgtaatcccagcactttgggaggtcaaggcaggcgggtcaactgagcccgggagtttgagaccagcgtgtccaacggggcaaaacctcatctctacgagaaaattttaaaaatctgccgggcatggtggcgcgtacctgtggtcccagctactcaggaggctgaggcaggagaatcactagcccaggaggcagaggctgcagtgagccgagatcgcaccactgcacttccagcctgggcaacagagtgaaaccgtgttttaaaaataacaaaacaaaataaaataaaatgaaataaaataaaaataaatatatatatacacgtttatatatttttaatttaaaaatttttttttttctttttgagccacagtttcgctctgtcacccaggctggagtgcagtggtgcaatctctgctcactgcagcctctgcctcccaggttcaagcgattctcctgcctcagcctcccaagtagctgggattacagacacctgccaccacgccaggctaattttttgtatttttagtagagacagggtttcaccatgttggccaggctggtctcaaactcctgacctcaagtgatctgcccgccttggcctctgaaagtgctaggattacaggcgtgagccaccgtgccaggcctatttttcatttttttgagatggagtctcactcttgtcgcccaggctagagttcagtggcgccgtctccactcactgcagcctctgcctcctagatttaagcaattctcctgcctcagcctcccgagtagctgggattacaggcgtccgccaccacgcctggctaagtttggtatctttagcagaagcgaggtttcactatgttggccaggctggtcttgaactcgggacctcaggtgatctgcccacctccacctcccaaagtgctgggattacaagcacgagccacttggccagaaacatattttttaagtaattccctcactgacaggttcctacaagtaaagttgagccccccctacagctgacggcgaaggaactggaagctctgcagcagggagaatctcctcaaatgtgcttcttgaaaagctggggccatgagtagcctcccattcacatccccatggggacccttctccagggcccacgggggcgggtggagccgggctccgggccaggaaggtcaggtggagatcacgccgcgtccactggggcagcattccgcacgacgtgaccccgggcactcggagcggggcaagtgcccgtggaccccgtcgggtgggccggggccgggggtggggctcacctgcaggggcggcgggctgtacaggaggctgcccgccggcgggggttcatgctgcgggtaatccctgtccatggcgggccccactgcaagcatcgggcggcaggcggggtggggtcctcggccgggcagcaggcggcgggactccaggacccggggccgccggggcgtctatctgggcttctcgctccgtggtggcggcggtggcggcagcatcatgatctgcagagggagacggggacgtcctgagagtccaacggtggtggagagtggtgctccccggccgcctctccctcgggcatgaccggtcccagcctgggctgcagctcctgctacctcctgggccggaaccaaaaggcgctccttcccctccccactcacccccacccgccatcagcagtgccacccaactcctttgtgctgcccacagcgcctttcctggcctccccggccccaactacaacgattaaggtgggcccgacagggctgcccaggtcacagggcagccgtaggaccaggcacccagactgtgagcagtggagctgcaggctgactcccccacatctggctttgtcagcagccggtgtgagactgtggagggagagtccaacccgggcccggcacccaggggagcccaggggacactggacccagccctgtccctcagaggcagcaggggctccacagtgaggtctcccaaggaggggggtcaggggccacgcagagctggaagagcacccagacctcgtttcaggctaatcacacaccagcatccccactgagaacgttcctgggctacagagccgagccccacaccatcagacgccagggacagctcccacgtgccccgcggcctctggcacacggccagacgcccgccaggctgagcccccaccaggccctacctggcgagtgcagggacccaggctggcccgtggtggcagggaaagctttccaggcgtccgcccagcatgctcactgccgagggcggcaggaaggggaggcggcggccactcccggccaagccctggagtgaagaaatctccgggacttccagtaattgccgtccagccacacgcaggcacttgtgcaatcccgtgggggagaggcacgtctctgcccggcgctccagagacagtggccgggcaacaggggctgggggtcgggactcctgtcccagagaccagatggaggtggtcaggcacagtgggggtcaccctgccaggccgtcccaactgtccgcggcctctgcctgctccctgcagtcaggacgctacaacccactgccaccagagctgggacccttggcagcccttccagctgcccacggggacctgcgacacccttgccagaacggccctttaggggaagggacaggcccgctgggatctggggtcttggccaatccttgtcaaagattctgggtcaggcaggatcaaagcctggctccaccttctgagttgaataacctcagacacccaagctcctccaagcctcggtatgttcctctgggagacaggttctctgggtagagcctgggaccccccgaccccggccccgtgtgctggtggccacaaacagctctgctgggcccaaggcagctgctgataccggggtccccatccaggggcccaccagtgctagggggtggcccaccccctgccttggggctcagcagcccctcccctgcagggactcccctcagctcctgtcagcaccccttcctgctgcaggttccatctcacggcagccacagccccagagctacgctgaccttttccacactcagggcgctcctcagctctgaggccacacagtcctgagctgatgggcagcagggcccaggccccacggtggacggagcttggggagggggcaccttgggcagctctggggcgaccccatgaccgtcctcggggtacaccatagctgagggacccctccagcagcaggggccctgagctcgcctgtgtccgagtcccctaggccagcacggtgctcctggcagctcctccctccctacggtctctgagccccccacgtctgtggacgccccttccaggcggcaaccccaggaggctcaggggaccgggttcttcaaggggagggcttcacacatggcatgtgacctggagtccatgccttggggacctggcagggtgtggagacctggaccgggaggggatgggggcaggagaacaatgcggacaccaggcacaaccaaccaagagtcagggcccaaaaccaggaggcggaggcggaggcggatcctcacacacggctgcttggcagtctgggattcctcaagaggctaacgctggagtcaccacaccaccgagcaattccacaccacacagaaacgtggccatgcacgtccacagcagcaccactcacaacagccacccgaggaagcagcccagtgtccacggataggcgagtggaccagcatgtggcgtggcccatccacgtgccagaacacgacacagccatgaacagcagcgaggccgacctaggccacagcgcagacgcaccttgaggacgtcacgctctgtgagagacgccaggcacagatgtgtgtgatcccactactatgcactgtccaggacgggcccatccagagacagaaggggatgcgtgggtgccgggctggggcgaccctgcacccggggcccatttccaagtccccccacaacccaacacttcaggctgtgcccactcctgagaacgcccaccctctgcaatcccccaggacccgccactcctgagaacgcccaccctctgcaatccctcaggacccacagccctgcctttccgcccactgccagccccccatcgcctcccaccctgtcctcggccatatctcacaacccctgctgccccgatccccaggccctcccgcagcccccagcccctagccctgcctgcagactcggtcctgtccgagggcccacgcccccaagggctggctcccaccccatggtcctgagccctccggacccttcccccattgactccgccgccgtttcttgcagcagctgtgaccacgccatgtctctggggcatccagctgccccaatccccaggataaaccctagtgggacactgggtggggtcttggggcctgagaacaccccaacgcagcctctgccacgcagccccggagacgctctccccacgcggccccggagaccctctgccacgcagccccggagacgctctccccacgcggccccggagaccctctccccacgcggccccggtgacacggcccaccccgagcctcagagccacgggccagccaaacgtccagcgggcagcagagcgtgtcccctgcctggttttatttttgggcgcgagtcccatgactggagggatgcgtggtgtgggggttgggggggcgggggtcacacggttcccaccttgggagggggcccgcgctttatcagcacgctgacacccagaggggatgtggcttccttctgaaatcaggtcttcaagggagtcgttgtaaaagagaacgatgaaggtgctggtggcccagacaggacaaccactgggaaggcagaacctcagacaggaccaagatccgggagaatccgaggaaccgggtaactgtgtccgcctcccagctctctcctgagtccgggtaactgcgtccgcctcccagctctctctcttgagtccgggtaactgcatctgcctcccagctctctctcctgagtccggataactgtccgcctcccagctctctcctgagtccggataactgtccgcctcccagctctctcctgagtccggataactgtccgcctcccagctctctcctgagtctgggtaactgcatctgcctcccgtctctctctcctgagtccgggtaactgcggccgcctcccgcctctttcttctgagcctgctgaagtccccgtcttcctggctggacgccccagggtctcaccccacgctgtgcagcaacagctcagcctcctgatgttcagaactggccactgtgcggaccctccccctgggggtccctgagcacctgtcgtgtggagccccttcgcgcgctccgccctcagacccgagccgtctgcagatggggagctgtgtcctcggagcccggttctcctgccgtcctctcgccgagcagggttgtgacccccgcactttcggatgtggacacggaggcccctaggtggagccttgacgtgacccccagagccagactcagcagctcaggccacgctgtgcccacgttcgcgacggcaaagcggagaccctgagaagacactggccgcagagccataaccgagaccacgggaggacccagggcgcacggcacaccccagagcgctccgcccaggcccgggttctggtctcctggcacacccggcagcatctcaaggcctgcgccagcaaaggcggacatggaggtctgaggaggaggcggcgaggcccgggcgagcgggcgcgaccgtggtgatggagcccggcagaggccaccgcacagtccctggaggccgcattacctcagccgaggttctccgggcaggcacaaggcgctccctgcgtcccaggacctgaagatggcaaggagcaggcccccgggtgtcccgggaaccccgcacagagccacggccataagacagagcggacttgcggcctccggtgacctcacagccgtgatggcctcctgcagctgtgaccgccgccccacagccgcgaccccacctgcagccgtgaccccacctgcagccgcgaccccacctgcagccgtgaccccacttgcagctgcaaccgccgccccacggccgtgaccccacctgcacccgcgaccccacctgcagccatgaccccacctgcagccatgaccccacctgcggctgcaaccgccgccccacagccgtgaccccacctgcagctatgaccaccgcacactggcctccagatgggctcaagacagggcaatcaccctctacctggcgggcgcacaactcgcatcctaggaccgggtgcagggggcgggggctggcgatttcacaaggctcagctaatatggggcagagagccctgcaagctcaggcacctgggcaggccccaactcggccgccaggaccgtctggtggggaggacactgcaggccgtctcaggtcctgacccctgcagacagagcgcttcgtccctcaacatggagcccggggcaagggaggcctgaagggctggagccaagggagggtcagcccagtgagagaccttggggggacgggggtagcaagagggggtagcaagggacagttggggacagcaggggacagtggggggacagggggcagcaggggacagttggggacagcaggggacagtggggggacagcaggggacagtgggacagcgggggaagagcaggggacagtggagggacagcaggggacagtggggggcagtggggggacagcgggggatggtggggggacagcagggggacagtagggaaacagtgggggatagtgggggggcagcggcggatgggacagcggggggacagcaagggacggggtgacaacagggagacagcggggagatggggacagcggggggcagtgggggacagtgggggaacagcggggggacagtggggggacaggaggggacacattcaagacatccgtgaggttcccctactcctgggccaaggtgcctgcctgagaggacttcgccccccacagagctgggcagtggcagaggagggggccagggaagggaggtgggtgagggagaccccagagtgtccggcgctgcccctgcccacgccagtgctgctctctgcagccatcagcctccgggtgcccccgcctgccccgccacgcggccacattcccgcaccaccctctcacacgttccaccccaggggcagcacccgccctctggctgtgggtgctggtgggcagcttgcgcctggcacctgtttgtgatgggggaagctgccccggcagcgaggctgagggagcgggaagggctgggcctggcagaggaagagcagccgctcacccacatccctgcagcccggctggggcccagcaagccgctcacggtccccaggccctcatgggcagccccccacccactgggtacatccaacttcatgcaccaagagcccatgaagaaaccactcccacacccctgcccaggcctcggggggtctgcggggcggcctcacaggaggcccagtattacaatggcggccgcctggctgcagtgagtgcctggtggacacccccgaagggcagtggggagacccgggggaggacgcacagagggtggctacagaacagaggcagctggctggagccaccgggggtctcgtccctgcagccttcgcctcctgggttccagtgatttttgtggacccactgggggtctcggctcactgcagccttcgcctcctgggttccagtgatttttgtgcctcagcttctggagtaactgggatgacaggcacccgccaccacggcccggataatttgcgtattttagtagagaaggggtttcaccatgttgcccaggctggtctcgaactgccgatttcaggtgatccgcccgcctcggcctcccaaagtgctggaattacaggcgtgagccaccaggcccggcccgaatggaaatcattttcatagtaacatgaatctctgtaactcactagactgtggccagggaaacctgtgggcagctctgccaggaccacaagggggcatttgctctggacggcccctcccagggtgggcagggcccgaggacggaaagaaagggtggagggtcctgaggtgcttcccagaaagctcaggctgctcctccagccaggcacagccagaccgggagcaccgggaggtgggggtgggggtgcctgagcactggaggctggaggtgggggtgggggtgcctgagcactggagatggaggtaggggtgcctgagtactgggggtgggggtgggggtgcctgagtactgggtactgggggtaggggtgcctgagcactgggggtgggggtgggggtgcctgagtactgggtactgggggtaggggtgcctgagcactgggggtgggggtgcctgagcactggagatggaggtaggggtgcctgagtactgggggtgggggtgcctgagtactgggtactgggggcgcctgagtactgagtactgggggtgggggtgcctgagtactgggtactgggggtgcctgagtactgggtactgggggtaggggtgcctgagtactgggggtggaggtgggggtgcctgagcactgggggtacctgagcactgggggtggagatgggggtgggggtgcctgagcactgggggggtggaagtgggggtgggagtgcctgagcactgggagctgggggtgggggtgccttcctgtctcaacacagctttacctcttgggcccgatgaagcgggtctcaggatgcccaggacccacattttaggaacggccacgtcatactacgctttctacctctcctcttgaaattttctaaaagttctcaagtctgctgccaaggttatcagaactgcgtagggagctgtgtgggtcacctgtgaggcccggagcctccctgacgcaggtggtgggtgtcatggctctgctgtcttgtgaaagagtcgtcagtcaggcggcagggccaggagggtgaaagccgatccactcccttccctggggagccgcgggggggggggggggggggttgggccaggcctgcggggaggagccgacatacagcttccccagcagccggccagacagacggacgtcctggcccaaggtgagcgggcacggccacagatggcgcctggggcctttgcaggcgccctcctggccccgaggctgtggggctcctttgtgggggacacagggctcagggaccactccacaccctagacgggagcagggatggggtcttttaaagttaaggttttattcttttttaaaataatacagccgggaacagtggctcacacctgtaatcccagcactttgggaggccaaggcgggtggatcacgaggtcaggagatcgagaccagcctggctaacacggtgaaaccccgtctctactaaaaaatacaaaaaattatccaggcgtggtggcgggtgcctgtagtcccagctactcgggaggccgaggcaggagaatggcgtgaacccgggaggcggcgcttgcagtgagccgagatcgggccactgcactccagcctgggtgaaagagcgagactccgtctcaaaaaaaaaaaaagaaacgctgttgggggcaggagcctggatctcaacccctgcaaggtggaaatctggcttcctctcacccatacgagcctgccagaggcaggaggctgacgccccggagggaccagctgacatcggccttgagggaccagacttctccaggccggcaaccttctcccagctttgtgaggtggagcccaacctccagaccaagagaggccttcctgaccttcaaccccatctccagagctccccagagctggtctagcccctcatctgacacacagagaaacggagaccaggaacctgacgctggtttccctagcccatgtgaggaccctgtagaccagctacatgcacacccagtccagccgccggacagcgttcagtgggaagagagcagaccatcgtccacccacattccagactccaactggcagaggggaggggacgttggggctgcagggccaccaatgtggacgggacagagccccagggacagcctgtgctggggacgtatgggggcaggatcagaccccacagtgcctgcgggccacaaggccaagacaggatctggtaagtgacgatttggaggctggtcctgaggtgcaagagggagtgccagggacagagagggcaccggggtgactacagtccctccagactcacatctacccgcacctgtgggtggggccttatttgcatacagggtctttgcacacgtggttggttacaatgaggatgctggagggggtggtctgtgtccctgttaacaactcatgtccttaagagaaaagaggaacgtggacacccacacatcgggagacggccgcatggagacggagcagaggctggagtgacgcggccgcagaccaagggcgcctggagccccggaagctgggaggggcaggaagggtcctcccctggagctactccttgacctcagcttcctgtggcctccaggacagggacaggctgctctaagccacccagtttgcagcactgctgcggccgccacgagaagctcgtccagggaggaggctgctccagccctgagccccacgcgactcccgtgagcacgaggactcgggtgccctggggtgaggcggcacgaggctgtctgtggatttccacagcatcccaggaggcgtctggaccgcagtggctccaggctgccaaccacgggcagaggccaccgctcccgagcttggaccctgccacgcgcaggcacaggccaggcggcgccggggaagcctgggggccccagaccggcccagcaccgcctgacatttctcaagcatgctgggggacggcccctcaatttaggatgaggacgaggtgggcccggcaggagggcaggagccggggtccagggcgagcaagttctccccgccccacgaggaacggcagtggccccggttgcctggaggtggaaggggcactgcagcctcaccgccccataccccaggagcccacgtgcttctctcacagggaaaggtgtactggccagactcagcgccctgaggacggggtcggaacccagcgcccaggaagctcccctccccccgaccaaggacctccctccaggtgggtcctctggaaactcaggcccgcggccatcacggcccctctcctgggagggctcaagggtgttggccgtgggggcttcacactgcaccccgatttcgagggaagcccctgcccatggcttccggggccttccggaggggccaaggggctggtgccatgggagggaaagttcccaagctcggagatggccaggagcaggaacagcttgagcgggtggccgaactgacagcttctcttgccaaacctcctgtcctgctccagcacaaagcctcccccgtgcacaggaacaggtgctaggacactgtggggacgtcccagatgccaggggcagtggagacaggaggaggaggaggaggaggaggaggaggaacaggaggaggaggaggaggaggaggaggagaaacaggtgctaggacactgtggggacgtcccagatgccaggggcagtggagacaggaggaggaggaggaggaacaggaggaggaggaggaggaggaggaggaacaggtgctaggacactgtggggtgtcccagatgccaggggcagtggagacaggaggaggaggaggaggaacaggaggaggaggaggaggaggaacaggaggaggaggaggaggaacaggaggaggaggaggaggaggaggaagaacaggaggaggaggaggaggaacaggaagaggaggaggaggaggaacaggtgctaggacactgtggggacatcccagatgccaggggcagtggagacaggaggaggaggaggaggagcaggaggagggaggaggaacaggaggaggaggaggaacaggaggaggaggaggaacaggaggaggaggaggaacaggaggaggaggaggaggaggcacaggaggaggaggaggaggcacaggaggaggaggaggaggaacaggaggaggaggaggaacaggaggaggaggaggaggaggcagcggcggcactgtgggtcttccacagggtgtgcccggaggaggtcaagactccactgccctgaagcaaacaaggcgtccagcccgagccagggtcacacgcccaacaggtaggatccagcaacccctgcgcagcagcccccgccatgcgagggaggacccggagttgagcgtggccctgcctgacatctgaccccgccgtcaggagctccaccaggtcagggctgctcagctgaccccacagccccaccaggcatggtcagcacggtgccgaatgcaggcctggaaagggaataaaggaggccctggggaggggccttggtgcttcatcccaagccaaccccgaaagtggaagccacagggccagggggacgtcgtggctgagatgcgagcagggtgccgggcacccccaaggcagcactgctgtccctgagaacagaaggaagtccaggcccagagtcagagccaagtggagtagtggtggttgctggcactcagtcccgtacccttggacagagcaagagtcccaagccaggaatgtgaggccgatgccttttaggaagaaaccacatctggggaaccagaccccagatcccagaacccagacctcagatcccagatcccagatctcagaccccagatcccagacttcagatccctagatcccagaccccagaccccagtacccagaccccagatctcagaccccagaccccagatctcagaccccagatctcagactccagaccccagatctcagaccccagaccccagatctcagaccccagatcccagaccccagaccccagatcccagaccccagatctcagacccccagaccccagatcccagatctcagaccccagatcccagaccccagaccccagatcccagaccccagatctcagacccccagaccccagatcccagatctcagaccccaaaccccagatcctagatctcagaccccagatcccagatcccagaccgcaagatcccagaccccagatcctagatcccagacctcagaccccagaccccagaccccagatcccagatcccagaccccagacccccagatctcagatcccagaccctagatcccaaaccccagatctcagaccccagatcccagacttcagatccccagaccccagatcccagacttcagatccccagaccccagatcccagacttcagatccccggatccccagatcccagacccgagattccagaccccagatcccagaccccagcccagagggaggcccggtgagggagtggaaaggagattccacgacacaaatgcttatgcggaaacagcctccaggccgggctgcggggctccaaagcagggtccccatgctccgagcgggcctcactgctacctggcggttaaaggcctgtccgcctggacagggtggtgcggctttctgtggcagccaagcagcttccacgcggcttctgctgctgtgaggagcccgctcgggtcttgtgtttattttcagtcttttggggccagtgcggtggcccgtggctgtaatcccagtgctgggaggactgcgtgagcccaggaggtggagaccagcctgggcaacagagcgagaccgcaactgcacgcgcacacacacacacacacacacacacacacacacgctaaaagccacacacgctaaaaaccttttaacatgctgagcttgagcctgtggtcccctctaacctacacgtctttttctcctgagcagacgttaagctaaatccccactcactccagacttccggtcctttgaaatggaggtgcccttgtgtgtcttcaatccatgtggagggtagtctggcccatcccacacctgctactgtcactgcctcacatcagcggcctcaggccacaaggtctccccacctggctccttggggagtgccaagcgttgccagcagccgggctatgctgatcccagacaagtggctcgaccggtcaccactgtccttgagcttaagtccagccttggtgacaaaaatgtcacaaggacctgcatccgagccctgagggcatcaggtcctggaggaggaggaagagtcccttctggcttcgggctgggcttgaggacggcagctccaagaccgcttagagcgagacttcagcgctgactgctggagctacgcaccctgtcctgacaatggccgcacagttaggcgctgctccacgcctggaggagggaactgagggcccgaaatcacagaagcaggaactccaggttcgccagtgcggcctgatccaccttccctcaaacgtagctgctgacaacgacacccacgcgccctctctgggcccagcaggtcagaggtccaggtgggctggctgctccacggccacggctccaaggccaaggtcaaggcactgctgtcctgggccctggtctgggttctccgggagagtccgcgcctgagctcggccgggggcgggattctgctccctgtggccactgggctgaggccccacttccctgctttcggggagccacgtcccccatcacgccatccctccctcctaaaagccagcagggcaaggtccctcttaggcttctgacctgacctcccctcctccagctggagaagggtcccacgcatgaggacatttgtgacgatgccgggacccgaggaatccaggacgacccctctgcagagcccctgtgccccgggaggcaccacacccacggctccagggggtgggggggacggtggcttctctggggctgacccagacctgcagtacacagcgccaggccatgaggtctcagcctgcggtcaggccgcgtgcacggaaacccaggctcctgaacggccagccaggagcaaagccggccactgagtacgggagcaggctccggggacacgctcccactccttttaggggcccagaggctgtggatgaggagctcgagtatccccctctcagtgtaacctccccacccctcccacatcctccaagtggggcaggagccgcctcaccagagctgggggagggggccacacaggtgcacccctggggaggggcagcggagacttgtgggcaggaatgtggccagggtttctagatcatctggtttttcaagagaagccacaagtctgcgtttgagggtggcagcccctggtgttccaaagtcggcaagcaattcaagcatccacacccccaccccggggcagcgttgggtgcccagacctcagggccaccccgagagctcctgcatccacctgggggctcgcagctcccccaagctcctggcgggtagcagtcattccaggatctgataaaagcccccgaaaatgccccggtcagcccagccacacccgggcaacaccgacagccattctccaccagggccccagcgcccagctgagtgagacccacccggtagcttccggggctgggcccctgccccaccagtgaaaacattctggtcacagtgatgccgccctgagaagctcctcaccgtcccccgtggccttggaacccccctcacacccatgggttccaggcaccctggcggctgtctgtccccacgaagcctggccctctcacagcgtagggaggctgcggtcaccagcgtgggtcccgcgacccattccacccggcccctgggcaccggaagccaggcggcgagcgcagcagaccccagaggcagctttcctcagtttacctgacatgcaaaggaagacgcctcctcactccaggctggacgggcagccgacggcggtccggggccatggcgggcagggactttctccgtgaccctccctggctgcccctccccagcaagtgagtcagttccagaaacgtttactgcccgccaggcccgaaggctcaccggctccccctccccacgccccagcacccagggccttggccccaggagcccacagcggcagagactcccaggaaacgcgagtgagccgccttccggaacctggcgcacatcactttcaaaacgcagcggggcctggaaccaaggccaaggccgcctctttcggtttcacttggacgcttgttcttgctggggatggaggtcaatcacaaggctccgggaagcacgggcacgagtcacaaagcaggtcactgagacagcggcaccaggcccgccagtccgatctgctgaccccagccagggcccagcactcccatgccctgcactgcacgaggctgcccgggacagtgcctgcaggggagatgactcggcaatgactctctgggcccctcctcccaccccatcactcatggggttgtccagggcaagaggcccaggggaatccgcaggagagccagggcacagggcacgagtgcggccccaggctgaggcctccgtgggactgagcttcagggccacgctgccatgctgagctctcacggggcctccgcctggaccaccaggcaccctcaggctgactggcccctgtgtgccacccatgtggcccaaggcctgtccccctcatgccaagagccccgtagggccccttcgagtagaatgcagcattccctgcccctccgaagcagtgagtggttcaggggcagagctgggcctgggcgaggggcccccggggggtggggtgatgccatcactgttgccgtcctacgggttgagacaggacagctgcccatcaccccttgatgcaagctggctgcaggctgcctgaccagttcccggggacaccgtgctcaaccctgtggtgacaactggggattccgaaggacagggaggtcttactttctgttaaacacttttattttccctgagatacaatccacaccaggaggggcacctgtccggagcatatgactcaacggtttcaacgtattctaaggcagaccaccacagcttctaattccaaaacattccgctcccccaaaacacagccgtgtccccaacagcagtcactcccccgcctctacagcccctgcaaccacacgcccacttctcttctgtggactggcctgctctggacacgtgaccacacgtctaccccccatctgtggactgccctgctctgcacacgtcacatgaacggagtcacgtgccgtggccttttgcgtctggcgtctctccgcaagcacgtctccgcagagcatccatgccgggcgcacagacgacagatctaatctccgcctcctcacggggcccaggaggcccagggcgagagctgatggggcccacgcatccgaaatccccgtcttggccagaaccccaggtttgccttcgcccgcagggctgagccctctcctgagtcctgggccctgtgacgggtgaccacacctcccagcagggaggcaaggtgaccacggggctggcagtctgctcttcgtcccagcccgagggtgcaggtgccggccaacctcccgggggttgggggcgagagtgcagaggcgaggggcaaggctgagagtccacccacactgccgggcggacagcgggcaggccaggacgagaaccaggttggggtgacctcgcttttaggcttcaacccggcagctggacacacccagccctccccgtgtgctgtctgaccacacagccctcggctgtggaaaaagtgactggaggtattccaggcctgcccgcaacaaatcacacacacatgcacacagggacaggccacacacgtgcacacaacacacgcacacatacaaaacacacgtgcacaagacatgcacaagcaggggtgcatgagaacacgcagcacgcacacaacacacacaacggacacgtgcataacggacacaggtgcacaggcaacatgcgggcacacacaacatgcacacaaagtacacgtttgcatgagcacgggtgcaaaggtcatacacatgcacccacaacacaaacacacacaaaatacatgtgtgagcaacacacgcaagcatgggcacatgggcacaggcaacacacacatgagcacacacacaaaatacacacaaccaccaaaatacacacacacaacatacgaggacaggcacacaggcacgggcaacacacaaaatacagacacacataaccgactcatgaacatgggtacacacaggcacacacacaacacaaacacgggtgcacaggcacacacaacacacaaacacggatgcacagacacgcacacaatgtgcacccataaaacacacgcgtatgaaacacacgagcaacacacacatgcacaggagcacacagccacaggcacgcacattcacacacacacaacgcacccacatccgtacaacacacacacagaacgcgcacacgtccgtacgacgcacacacagaatgcacgtgcgtacgtacaatgcacacaaagaatacacacatccatacaacacacaggcacacaacacacatgtgcatgcacatggcgcaacatacagatacacaaagacacgtgtacacacacatgcagagtccccagggcagcgctggcgtcatggggggctgcctccacaccgcctccaggagtgtttacagctgtggattacatgataccgcccccttcccagagctgatcccaccccccagcatgggggccccctgggagggggcctctgggagccggactggttctgtcgacacagtcgcctctttgttcggggcagagctcactctggcggtgttggcgtttccgcatgggccctgccggaggggcatccgtgactccgctggagccgggttgggccaagcccaagctggtcacacccctcacacccctggggttgggggaggccttaggcagcaagtgggtggggggtctaggggtggctggcgcaacctctctccacctcggtttccccgccaggtgagagggcagtgactgcccatggtcacgcggctggagaacatgcaccctctcctccgcacctgcacacctgggtgcctcctgtctagcccagactccaaagccaaccaagagtgaatggatgaacggagaggccagaccccaaagcaaactgagagtgaatggatgagggaagctcctgctgcctcttctgtgctctgacaggctccctccccctgaagtccagcccctgcctgcacagccccctccacaccagggccctcctggctcctggcaggtgtgggcagatgtctgccgggatcctcagagttaaacaaaagcctcctccctgtgctctgaaatcacactccaggggctggcaggcgccttccaagtccttccctctccaaggacgagagcctgcctgcgtctcctctgccgtctcccctgccgtgggaggccctgaggcccccatcctgctgttctccatcccacccaccaaggggtccagatctcaaattcgccctttctcggcaagaactctgaaggtggcccggagcaggccactgtgagaagccatcaccccacgaccagggtcacccctgggaaaatctggggccgggcagccagatccctgaaggccagaggatgtctgggaagaaagggcgtggacggcacctgctgggcctgccacaaactctctgggtcccatgtccccgctgctcctcttccagggccgagtcagggagagacatcccagggagggcacccgaaacagcacagcacccctcagtcaggaagcagtgccggctgccctggcccggaggaagaggcctggaagaaagtttgaagcctgtaatccccgtgtaatcgggctggctgcccacggggtctgcggccctgggtcctcggcccctcccatgctcttctcttgaacctcggcttcctctgcccctctgtaaaacactcactgcaaccgccccccccgccccggcaaactggcagccagcatcagcacaggccagctccgaggccgggcactctcgctgacagggcgtgcaacagatggcaccaaacctatcccgtcccgtcccagcagtcacaggcaggaaggacgttctgagcaggcgggaacaacaggcattccgggaagaagcagccaggggaggccccggctacacatttaagagattttttttttttttttttaacttttcagaatgttaatcagttcatccagggagacacccaccgtccctgccccagcaccatccgtgcccggcgtccctggaggcgctgggtgggctctccacaacgcctgccccccacgccccaggtcagtctggggattggtccctccaggccccacctgccttattcttcgggactctggggtggtgggaagagtgccctacgggggacaggacccaccaggaggcctgcgcttccccttcaccgacacacgctgctcccgggccccactcgggccatctcagcccgctaccctccctcccgcctgtccctggaagccgggtttgaatgcgacccgcactcccacccccaacacgctctgcagactccgcccagacggccccggggtcacctaatatcagcaagcccccatcccaaaccgggggacctccatgcagaaaccgaaaaaccatctgccccagaagagaagtcggaggccccaggagcgggaggggcggggagcaaggggagggagggagacagggctgcgctgcggggccgagaaggcaagggtcctgggaccggggacaaggaggaggaaggggcacgaacgcccgaggagcctggagtcaggaatcggggcggcgggagagaccgggggtcactcccaggaaggggtcgaggtcacgaggcgcatggagtcgagagtccccaaaagggaaggccaggataccgaggaaaagcgggtgcggggtcaccaaggggctcgggggcaccgatgagtgcggggtcaagggttaccagaaaacgaaaggtcgggggtcaccaagctgcgcggtacagggagtcacccggaagagcgggaaggaaaggttgggagggttgtcgtggaaggtagggttaaggttcacggcagggggtcgccggggggcgggggggcaggtcaaggttcacggcggtggtcgcggggcagcgcggggtcaacgttggcggcgaagggcggggtcggaaggggtcgcggcggagggcgggggtcccgccgcgctcgcccccgccccacggcccccagaacccccagccccgggcgcaggggtccgcggggagcgccggacccacaagcggggtcgggccaggcaggggtcgcggtggagccggggcgggggtcgcaaccagagcctcacctcgggcccgggtccggccgggcgcggagcccgcggcgcctgtttctccgagcctcgcagctgccgccgctcacttccgggtttcgggcgccatcttgggggccccgcgcacttccggtcatgccgcggggcggggcctccacctgcgggggcgtggtctcggttcgggggcggggccaccttccaagccaatcccttgaggtccttccgctattcggaaggggctgggactcctacggctctgggttcgaatcccgccctgcctggttctcttgagaccccagcatgtgctttcacctcctcaagcctcagtttcctcttctgcaccgtgctggtgaaatggaatctgctttgtggtacagcatccccttttttcctccttcctcagaaccccctccaagcctctgcatgtgccacgtcccccactggggctcactcacccgagacttttaaactgagactccctcaaaagctactaagacgatcaccagccgggcgcagtggctcacgcctgtaatcgcagcactttgagaggctgaggcggatggatcacttgaggtcgggagtttgaggccaacctggacaatatgatgaaaccccgtctctactaaatatacaaaaattagctgggcgtgatggcgggcacctgtaatcccagctactcaggaggctgaggcagtagtatcgcttgaacctgggaggtagttattgcagtgagctgagatcgcaccactgcactccagcccgggcaacagagtgagactccatctcaaaaataaataaataaataacgaaataaaataaaatgaaataaaatcatcacctctgggcctgtcagacatactctctcacgaaaagttatctctgttcattaatctctctccctaaccaaatacagttctggacgcttcagcatggtgactggcacatgggggtttgggtaagtcccaggggctacccccaagagagcaggatcctttcaggcagggccacgggggcctgaggggctcctcctctcggtggctgtggtgggaggctgccctgcgtggggagctggagtctcagggcacttttcctgtgacttgagccagtgaaggcagatccagtgtgggaggcaccaccgcctccccagcccaatttcagccatgacaatactgatacagctccctggacccaagcagccacaagccagaggcctctgcccccattccaaccccctgaaactagagttgatttctccatgactttgttaattcattcagtgacttctaatcgatgctgctctgtgcttggtcatgagctgggaaaacccagggtctcacagaggactcagctgtctgtcccaacatcagaaagcccctggtctaggggagagagaaccaggaccagacactccaatatgcgggatctctgggagggttgaaatgtctgcctagggcttcatagagggctgcatgctgaagagtgtgttgaagctggggttttgaagttcaagtaggagtgtaccaggtagacaagagtaggaagaacagtccgggcaaagaaggcctggtaaggcagataataagcaggtttaagatattttagcacctctctaaaaaactgaggccaa

SEQ ID NO: 535 - DNA, 58428 bp, Homo sapiens
  source 1..58428: mol_type = genomic DNA
ggctggagtgcagtggcacaatctcagctcaccgcaacctccatctcccgagttcaagcgattcttctgcctcagcctcccaagtagttgggactacaggcatgcaccaccacgcccagctaatttttgtagttttagtagatacgggatttcaccatattggccaggctgatctcgaactcctgaccttgtgatcctcccaccttggcctcccaaagtgttgggattatgggcgtgagccactgcacctaacctctgtgatctcttaaatatatatgaagttttatttttgaaacaccaaatttcaaatgaagcataggcattttgatctatttcagttaaatttaacacaaaagcagtaaattgtagtgacttcatttttttcaaccacaaaatgaagataacaatgaacaaagctaaagtaaaactcagaattgaaaaaagtctctgtgcatcaataataaatactaactccagcatggccagtgagcctagagccatttaatggatagtgtttgtcctgttgatttagcatgcattgaaacaagaagcaagaagcagatgagcatccgtgaaagaaaaagtactgggaaagaggcttggcttcaaaatgaaaggccatgtgtctcataaatgaattttgccagcctctatttattgcataaaaattgctgtagatgataatggatttgctctctagagctaagataaatagatctggattctaacctcatcaggttacttgttttgagacccccaggttctttactcatcctccatcttgatcaaatttgtagtgccatatttattgtatggctttacattttgattttagtatttgaacaaatttcagtgttcaagattgcacatagtaggtgctccataaacccttatttaagaatctgggactacctggacatacttctacagtatgctgggagtatggtttctcttcaggccaaagtggaattttacttgatggtttgtgtggacgtttagaaataacactcagagctgatatttctacagattttcaagtttatcactttaatggaagtttctggcttcttgtattaaatatccccatagttttcctgattagtaagaggcccctcagagcagggtataccttatcatagccaccattaaaagttcttaggacttcatcttttgtctctctaccattcattgcctcttccctcttgaagctgaaaggctttagacacaaaaacaaaaaacatattctagaagttgacaaaattaaaggtgtgctgtagtggtgatctggcacgttgtaattgagactgaggaggtgaatgacttacatggaggtcgatggagctgaagagggtctctaggaaatgtcatagtcaagaggtttgtatgcagaatgtgggggttgaagagctgtgcggctcctggtgagaggcacacttatctgggatgcagtctggggagtcctggcgaggcagcttccacctgctggaggaggggccggggcggagctaagatgcggaggagggtgacgcactagctctccagttcgcccgttcctggcctgacccccaccaaggcccataccgcagtaggctcctcgggctgcccctcggtgagtacagttttgatgtcggctcggccgcctgccgccaacccgagatttggtattgccagttgtgggagggcgtcctgctaaaatccttgaggtggaggctggggtcagacgaaggatgcgtaggggattagaatgtttggctatcagtaaggggaagggagtactgagggaggagattgtgtagttcatcaaatcagagcggcgtttgctgggatgacatcctgcattcagagtggacaagggaaagatggagatggagagcctcgtgtctgcctccagccttttccatcagaattgcagattttgctgttaaacagctactctcagctctttggagagcaaggttttatatctagtggctagaaaaggccttttctttgcagaaaaagaaattggagggtataaaaatttttgtttcagtaaaggaaatgcacgattttgcctcctcccacctctccatcccccatcctcagtagaagaatgattagaaggagggtttgcgccggtcctggtggctcacgcctgtaatcctagcgctttgggaggctgaggggagggggtggatcacctgaggtcaggagttcgagaccagcctgaccaatatggtgaaaccctgcctctattaaaaatacaaaaattagccgggtttggttgtgggcgcctgtaattccagctactcgggaggctgaggcaggagaatcacttgaacctgggaggtggaggttgcagtgagtcgagatggcgccactgcactccagcctgggcaacaagagtgaaactccgtctcaaaaaaaaaaaaaaaaaaaaaaaaaaagggtttgcaaggccgctgcctgaagcatgcatccaaacacgttaagcagctgtggggtaagctgcaaggataatgttcacttgttttgcagacatacccatagaaaccaacattttggacaggttgaccctcccacccccaggctagttaactccctctcaccaccactgcctccccatattctaacctccagaactgttaaggcaatgttagcaacataataatagcaatataggggctcattctgtgcctggcattgtcctaaacactcttaacatgtatttgcacacaccctcacaacaaccctaaaaggtaaatgctttaattatctccgttttgcagaggaggaaactgagggacttgcctacgatcactcagcatgtggctgagcaaacaaacctcaaactaccccagcagattgcagggctggatctaaggaacattttccttcctttcaggatcgcaaacgtattggatgtttgctaaactgaaatgtttccctgccaccactcccaaccttcctgagcttcttgatttgtgtcttcctgactccctcctgttagacttttattcccagagactgggaaaacccaagatgccactatctctttctcaaaatgtaagcaagtttggtttatttgttttagtaagagagggagagagtgatgaagttaggagtaatgcagaactttcagggagctacaaggaggataaaaattatgagtgagaaccgccattccagcctagctttctcaagaatgcaaacagagggaattggatacctgcaactgttttgtttaatacctttctgcaatgatgctctgcctagcatggaaacttaagacaaaagcaacctcctaaggattctttgttacaacccctttctgggtggtcctcgaaccacaacctggagtggttgcatcattataattgtattatcacaattgccgattgtagcctatcagtatacatttggtcttttatctgcaggttgacaatggtctccaggatggtctctaccatgctatctggcctactgttttggctggcatctggatggactccagcatttgcttacagcccccggacccctgaccgggtctcagaagcagatatccagaggctgcttcatggtgttatggagcaattgggcattgccaggccccgagtggaatatccagctcaccaggccatgaatcttgtgggcccccagagcattgaaggtatttactgtgttctgatggtttgaagtttccgttagcattttaaataatatatttgcacacttctcacaacaaccttataagtagatgcctttattatcctatttttttcagaggaggaagctaatttttaagagactctactttctcatggttttccctttcttcttctacacagtgtctacatacttacatatacacacccacatgagactataagtcctgtgagagcagggaccttatctatctaattcatagctgtagccctagcacctagcacaatgtctggtacataataggtgctcaattaatgtttgttgaatgaatgaaggagcatctagtgttatcactaaagaaagattagaacccagacatgatgttttctcctcactgctgatcttcaggaaattgtgtcatcagatagctgccttttgagtcaatgccagccagtacttgtaaaagagcttcaaaatgtagaacctacaggatctgacttgattcctaggaatgactccagtatacccaagaggagacaaaagaggtactgacattaagagtttacgtgaaagcttttgaaaatatttaaaaatataacaattttattaaataataaattaagaataattaaatcgttttaaggtggcaagaccattttccccctgaagttttccaagtttctggcaatgtggtcataatacttgtattagaaagcagtacttcatttgtttgttgtttaatgatttgtttataaagagaatctagcttctatgagctggtgatgcagcgttagacagattccttatttccatgctttgctttttatcctctgattctaatgatctccttctccactaaggcagaatcctaaagaagtagcatggttaatttcagttaaatgcaagggagcatttccttatagttcaaggatttgcccatggagtgggtccgaaggaaaatgagaattatctctaaaagcataccaaccaaatgctgtttgttccctacagattgattatgcactattttgccagagtctgtgattttctaaaaatgctatctgccctagggttctgtgaatgccatgaatattgttgatagatgattcttatttctgttttgttacccatagttttaagccattgagtaaaactaattcggtgagattgtagtctgtttaggttgacatttgatttcaggagtggattaacacaaatgcgttgaatcggcaagcatgcaaacctagcacatggcttgaattagaacaaatccgacagagcttcctgtcatcccttttagggagaatctcagtccttctcagcatctgtcaccgttacttcaagcacacctatatatttcaggccagctcttttgagacaaacaataaatatctacctttttaaggcaggaagtgcttggttattcacctaagctgttgtcatggagttctctgagtttccactaatacctgaggcctgatcagctgtgctggaaaagaaacagccactcccggggcatcaaaagcctctttatccagagactccattccctccagtatccaactatttagtacccactatataccaggcactaggcaggagactggtgcagctctgccctaaagattcacagtctgagtggagagggaagtggggacacacatcaaaagttatgacagtgcatcccagcaggtgttttgatagatgtacacacaagctgccgccgtggaagcaaacaggagtaatttagtctgcttaggagtggatggggtggctataaggaaatgctgctttgaagaagcaacatttgacctgggttttgaagtttgagtaagagttcatcagggaaccataagtgtaaaggcatggaggtacaactattatgtacccacaaaaactaaaaaaataaaaggcatggagacatgaaagatcatggattaggacaattcagaattaaaaactctgtttcccttattacccttggaataatgtgcttaacatagcaatttttttttcttctttttgagacagagtctcactctgtcacccaggctggagtgcagtggtgcaatcttggctcactgcaagctctgcctcccgggttcacaccattctcctgcctcagcctcctgagtagctgtttacaggcgcccgccaccacgcccggctaattttttgtatttttagtagagatggggtttcaccgtgttagccaggatggtctccatctgacctcatgatccgcctgcctcggcctcccagagtgctgggatcacaggcgtgagccaccacacccggcctaacatagcaatcttaagtctcccctatcagtatctgtggaagggatgaatactgacttgaattttagttttctattactgtataacaaattaccacaaatttagcagtttcacacagcattcatttattatttgagttttccactgctcaggagtttggtgcggattagtgttcaggtgctgaccagaggtgtcgtcttggctgcagcttgcgtcctcttccaagctcgttaaggctgttggcagaattccatttgaattatattgtaggactgagttccctttctcttgctggctgtcagccaaccaaagcccctctcagctcttagaggccgcctcaggttgtaagccacatgccttctcatagctggaaggagaatatctctttagtcttctaattataatgtaatatgatcctgggagtgactatcccatgacctttttcggataacaagggactgatatctcattatattcccagcaggtgggaatcttgggagtcttcctagaattgtatactatagctaggatgaaaactaacaaagaaaatagtccaaagatacttggggcaaaaacaacaaaataaaaagcctgggtttttcccagtctgggaccttggcattgaatttgttgggtggtctgatcatttattcatgtgagttagttattgtttcacctcatccatttatttgcattatctttgctcacactccctgatgctaattccctctgacagacacatggagtatcttccatacccttccaacattgattttaggattttattgtgaagaaccaagttgggaaagtttatttttaattgttacagaaagaatatacataatatattatcatattttatagtaatactgtattctggtgtgaatttcaaatacacttaacatggtgcttatgagcacaaaccattgtcagagacacccgaatttgaatgccagcttcatcatttattactaatatgaccttgggcaagttacttaactcctataaccttctgtttagcttaggggtaggatttaaattcacttacttgtaagcaggtaatgttccagtccacagaagcaaaaataaagttttagcatggataactgtgctacgatgaaataatttctaaacaaatcatcatcatcatcactttagataattactggatgttaagttccttgcaggcagagttgttcactgcccaacacatggtacatagaagacaaatatctatcttgtctacttaaataaattaattgtatgatcaatggatcttaacaaatgtgtatatttgctctcaaatatagaattataaattggccttttagtataggaatatagtatcagtataaattaatgttaggtcagtgaggtatcatatatcccattaaaaaaaacatatcttctttgattccatatcccttctagttactgttccaattttctgctgcctttcacagcaacctttcacagctgcctttcacagcctttcctcacatgccaattgtacttcttcacctctcattctctcctggtccattgtagcccactgttctcaccgctcattcattaaacctactagtatttattgagtgccaggcactgttttaggtactgaggaaataaacgtgaacagcaaagtagcagggcgaggaaatgtagtccttaaataaacaaataagtattgggctttccttttttcctttttttctttacccatttgttagtttcgtttacaggtttctctggcggcctttaaaagttaagttctccagggctcagtgctgggtccacttctcttatttccctcaattctctatctacttgatctcattcattctcttgactctcaatccatttcttggctggtgactccggtgtttgtatttcagcccacatttctttcttgcatatccataggcttacactaattgctaaattgccaggtttcgatcctgatttctcaaaccaccaccttccccagcctgtttatatcagtcttttctgtctaaatgagtagtgcccctgcttagccatatatgcaaactaaatacctacagtaacccttgattttctccatcacacttcatgcctcaattttaagtaatttatttcatttttatctctaaaatccatgtgcaatttcctgtctgcttctctctagctctactccaaacaccctggtccaagataccatcatgtctggcatggagttttgaaatcgcctcctaactcatcttcctgcttctattcttgatcccttttcgattgttcttcacaggaagaacaggagttaaacttttttcaggagttaaacttgaaaagtttaaaccatattagtgtcatctccgtagttacaattccattggtggcttcccatcgtaccctgaataaaaataacccttcttgccatgacctacgaggatccacagctccagtcaatcgtactccctactttgttccacgcattctggccctgagtcacaccggcctcttcccacctcaaggctatcaacacattggatgggatcaacaatgggaggctatcaacctcccattccttgtgtagcgagtttcaaagtcacccactcagagagggctgcctgactgccctgtctgagtagcacccccctacattctctgttgcagtctccttttttttttttaaaaaaaaaacagagtctcactctgtcccccaggctggagtgcaatggtgcgatctcggctcactgcaagctccgcctcccgggttctcgccattctcctgcctcagcctccccagtagctgggactacaggcgcccgccaccacgcccggctaattttttgtgtttttagtagagacggggtttcaccgtgttagcctcctgacctcgtgatcctcccgccttggcctcccaaagtgctgggattacaggcgtgagccgccatgtccagcctttttttttaaagctccatagcattttttgtcatttataatcattgtttgttttcttgcttattgtttatctctccactggaatgtaagctccatgaggctatatctgcttattaactgcattatattccaggcacatagtaagcattcagtaaatatttgaggaattaatgtataatatcagggggaaataaatatacctaatggcaataagtatgtaaatactgttttacatctggatctgtcaagactttctgccttttagttcaaggaaaatattccatttctattctgtttttaaaaatctctgcctagaggttcttgccatgagcttagtgataatgtggtgagcaaaaatgtctgttatctagaattgactatgactgtgatcaccatggtgcaaggtttgtgccctttgtacagcgcctaccaaggagctagaaggactttttgcagtcctgggactaaaccagcagagggccaactagactagaagtttattttggaagattcctgaaccctggtagccagcctcctggtcgttaatagctttaagtggtcgctggggtagaagcatttgccaaaacatccagagaggattgggggttatgtttaacttctccgtgggcgccttaaaaacagcttggtaaggagcatctttcaaatgtgtaaattcttagtccaaagcaaataaaaacacaaagacaaacagggacctacttggcattacatgaaaaaaaagagtgtgtatgtttatggcagagaactcgggttaacccgtagccgtactattttctagctatgtgtaatcctggcaactttctaagcctagttctctcaaataaaatcggcccaaataaaatgggcttgtctggttcgagttggtgtttgaaaaataaaaataaaataaaatggggtttccagcccactcttacatgcaatcagtgggtgccattagtaactgaattgcaggccttcctcctctcactttgtggattatcaacaacatgttttcagtctttaatggcttaccccaatcttatttatttatttattttttgagacggagtcttgctctttcgcccaggctggagtgcagtggcgggatctcagctcactgcaagctctgccctcccaggttcatgccattctcctgcctcagcctcgcgagtagctgggactacaggtgcccgccaccacacctggctaatttttttttcgtatttttagtagagacggggtttcaccatgttagccaggatggtctcgatctcctgacctcgtgatccgcccatctcggcctcccaaagtgctgggattacaggcgtgagccaccacgcccggcgccccagtcttatttttgattactcatcagttagcaatacagttcagatatgcttcagtgcaccatatatttcagcagtaaccatcttctcccaagcccacggttgctcactggtctccaagacatagctaaatggctactgttgtattatccccagaaacaaataaagccaccaactgtccaggggactgattcggagaaccatgtgctgtgagatgggagctcttgggagttagaactggttgtgccagctgacactgatgatggccttggatggccttggatgaatccaaccagaaaatgtgctttcgttttcagaacattaacagcttcaggtaaaagataggctgctcagtgccagctgttcattttccccacagttctaggccaccagctatctagcactgtgataacaccagttatctagccattaagatagaaatgtataaacattagcatttgatggctctgagtaattttaaatccatattgccaaacattaaaatacccacgttctgccgggcgcgatggctcacgcctgtaatcccagcactttgggaggccgaggcgggcggatcacctgaggtcagaagttcgagaccagcctggctaacatggtgaaaccccgtttctactaaaaatacaaaaaattagctgggcatggtggcacgtgcctgtaatcccagctactcgggaggctgaggcaggagaatcgcttgaaccctaaaggcagagattgcagtgagccaagatcgcccattgcactccagcgtgggcaacaagagcgaaactctgtctcagaaaaataaaataaaataaaatacgttcttttttataacactgactgttggacttcaaatttttcacttagaaatagagacccaaggttattttcttaataaatatcaagtggagaaagagtcctgtggatgataggctacttgaagaggcagatcctaggagcctctactctgccaagctttggccttggtaaaggagctgcagtgcctccgctttgccacagggtggcaacagttgcttcccatttgaggatggcggggtgaagcaaaccttgaactgtaggggacactccgtttctggctagtctctctctgcagttggagaaagcagtgcagctgactcttatgtgtcttgactaaaatctgtttctaggttatcctcaccctggaggaaccaatgagaacattgggcttgtaggccatctatgaatggactgggaccgcccaatgggcccatgcctttggggttgcattttgtccaccttgaacttcaatccttaaagtctctggatgattttcagtttttctctgttgagcaattgcatggatagtaatgagaaattcaaaagaaacggggaggttctttttgggaggggaaaaggataggaaagatgaacacgatgacatgtttgtgtatgtttacagtgtcctgggtatccagaaggcacttagatgtatatggcacaggagagaagtctgggagaaggaagggtttcagagtcatccccgtgttagtggtggctgatactgtaggggtggatggggtcaccctgggtgggtattgagaacaacagggcacctaagacaaaggccaggtagatgaagaagaatccacaaaggaaactgggataaatcggccagaaaggagaagaaccagaaagatagagtgtaatgaaaacaaggaaatagtgttctgagaaggggcagtggttaccactgtcaggatcagcagagaggtcacatgaaatagtaaaaaccactgggtgtcaagtgttcactgggggtagcaacacagaagttactgctttgtgggggctttgggcagagccggctctggggagtagtgggggcccaccatacctgcagggcattgaggggataaacaaggaagaaatgcaacgtataaatgtgttcccagaatgtcaggtaaaggggagatgagtaatagctgtggaaggattgggggaagggtgaatgatttagagctgaggacggtttctgttaaggttgttttaggatgtgagaaattgaacttgctgaagtgctaattgctaagaaccagcagagagggagagttgaagatgtgggatggggagcagcaactgaggaggtgggagaggatgaggactggagcacaggtgttggcctgtgtcttaggtctttccttcctccattggggaaaaaggaaagtggcaaaggtgtgctgggatacagagctttggaggttttggcctcaggtgtttgcaagcactgtactaattctagccaccttctcaattaaaataagaatacaagaatgaaatgcagtctcccaaatctcttttctttgccagcttatacatttatacacctcactgatatgtcttttgatgttttaaaattttggacagcactatttttaacttttacaactataactattagttatttactagttatagtataaacttttaatatttactttttataactcctagatgtcttgtagatcaaaagatctaaagtgtcatctttgtctattttatatcttgtttaatagtaataaatgttttagtgaagcataaacctagaacaaaaatagaaaataatcttaatagggtgttggggaattttatgtgaacacttcatgtgtctttggaacagtacaatgtaaaaaattagcacagccttattgcatgcacaaaatgtgaaataatgtgaatcttccccaaataacaatttgtcaagaatcacaatttcaaagtagtaggcttagtaattctaaacagtgatcggtagaatctgtcatcatcctcaattaggattgttcttgaattttgtgaattttcaatcacgagtgagatctttagtccattccttaaataacatgtgactatcttagaatgtcaaagagggacacagaaaactagataacaactcctgaaattaagtttgctgtatggcaactactaattgctctgccagttgtctgactgtagaataatccttgtgaaatattcacttctatatgggttggagcctgggtaagtctgagccccagtgtattttcatggaagtcactagaaccagatgtaaatcctgggttctctagagaaacagacaaacagaaccaatagaatgtatagagagacagacagttattttaaagagttggctcatataaacgtgggggctggcaagttgaaaatttgtaagacagactggagacttgggcaagagttgataattttgagtctgaagacagtccagaggccgaattatttccttttcagaggacctcagtcttttctcttaacgtcttcagtgattagatgaagtccacccgtattatagagagtaatctgcttttcttaaagttcactgatttaaatattactcactttaataccttcacagaaaaatctagtgttggcttatgatcacacaactgggtactataacttaggcagtctgacacatgaaattaatagggtgttggggaataaaattaacacagctgtcatcaagcctccatttcctaaggaaaattattataatccacataaatatggtattttgcttttgaatctctctaacagagtctgggtctcaaattgtcttcatgcacagtgtcatgcttaccctcacaatcacttactggaggcaggcaaggagggtgagtattccttgccaccttttacagatgtggaaaaagaaactcagagatgagacttatctagggatacagcttgtcttctggtctgttcaggctgctataacaaaaattccacagactaggtggcttaaataacaaaggtttatttcacagttctggaggctgggaagtcaaaaccaaggtgctggcagattccgtgcctggggagagactgcttcctgattcataggtggctgtctttcattgtattcacatggcagaagagatgagagagctctctggggcttcttttattaccatcacattggggattaggcttcaacatgtaaattttaagaggaacacaaacattccatccatagcccagctagtatttgtgggatcagagcctgagctggaccccggtgttttcctcttctgtctgtccagcacatcacactgcttctttggctagttgatctagttaattataggtactgtacagatgcagaaagtgttaaaccttgaccacaaggtttatccttaaggatgatcctcactcctgggctcattgttgatacttctttgtatttgcttctttagcctcattgtgaattggcattgatgatgaggaagagcttgccttcctcactagactgagatttgcaaatgcgcacacagtatctgcctcgctttttgtgtctgtagtgcctagacaaggccaggcaaataacacccactaaatatttgttgaaacaaccttgccatatttgctcccttgaaatagccattgacctctgagacaccagcaagtgggactcgtgttattccagtcaagattatccagccttcgcaacatgtaaatatatctggagcattttgacggtaataacctaaaagtcaccggcatttctcacacttggtcacttaggactgcaatttcctggaaagtgctttaaatatttctggagattgccgggcatggtagctcatgcctgtaatcccagcactttgggaggccgaggcgggcggatcacagggtcaggagatcgagaccatcctggctaacacggtgaaaccccgtctctactaacaatacaaaaaattagctggacgtggtggcgggcacctgtagtcccagctactcaggaggctgaggcaggagaatggcatgaacccaggaggcggagcttgcagtgagccgagatcgtgccactgcactccagcctgggcaacagagcgagactctgtctgaacaaaaaaaaaaaaaattctggagatcatagagcaaacaccatatatgatcctaagcaaaatgaattggtccacttccgtgggacagttacccattttccccttttcctccccttgtccccttaagttcggcaccaccatgcccttcagctatgattgtctcccattacagctggtgggtgcccccaagctatgcagcctcagggtgttctgttgtagtgggtgctgacttgggagggcaacgggaaatcccctcagtgtatgctatggtctgaatgtttgtgtctcccccagatttatatgttgatgcctaatccccactgcaatagtaataaaagatagggtctttgggggtgattagaccttgaggacttcacccttacaaatgggatccatgcccttatgaaagaggccagaggaagctcatttgccctttccaccgtgggagaacacaggagacggagccactgtgaggaacaggccctcaccagacacagaatctacaggcactttaatcttggacttcccagccccacaactgtgagcaataaatttcagctgtttgcatatcacttggtctaaagtattttttacagcagcctgaatggaccaagacagtgtgccttgatatccctaaatactagagattttttagggaaacatagctttattttttttgcccctctgccccacaactttctgtaggattcacatgggggtgttggacatggagacaaagctaagcactgggaaccataggttctaaaaatcccaacctttccattgaccactaaggcattatttattgtctggtgccttgcagttggcaagccgactcctctttccttcagtctgagctttctcctggaggtttctaagttcctcatgcaaataggcttctggcagatgtcctctcagacatatctgttcaaaactcagagtgttcaagctgggaccttgtttcacgtcatctggaaaaagagggaggcaacaggaagtgtgctgagtcgccagggaagccacaatcaacaatttcccacaggtaattgacaaagtggatcaggcacatgtaggaagtggaattgtggtaactaaattttatatattttatggcttgcagaaatacttttctatattctgtctcatttgatacagcctttaaaaaggttaaaaacgtttatcattgcccacaatcacaccgcttaagctttacgagttaaatgtcctgttggcaggacagctgtgttaggtttaaatgtatctccccatccagctgtcttctatcctggtagactagtacaatcctgtgatatttagctgagaaactataatgtgctgggagtcgtggtaaaccacatgtggatttgggtggatggtgtttcagagatgtgccgcttctggaagcaaatgttctgacaaactgccttcttggaaccaattggtgcaaataccttgggcaccacagttcgtaaagagaactgtcgaaggcggctggaagggtttagcagaccacaatttcgcaccgcaaatataactgagcatgcacttttgaccatggtgtgctgtgtgatgttagtagaggaaggggcactggcggtggaggctgggggggacttggtttgtacagcatagcaggaagagcactgaggcaggatgcccaggggttctagtcctagctcagaccagctgcatggcactgaacaagtcccttcagttccgcaaagtttagcttcccaatctaaaaatagagataaactgtccagtccatctcacaggtttgacagggcagtcaaattaaataatatatataaacgtattttggaaagtataaaatggtacacaggtgcaaagcatcattctcatggtccttaattctttctttcatcctcctgtatatatatatatgtatgtatttccaggtgtaagtggctttgggattggaagatagtcatatctttcaatcttaagtttccttcacgtggcctcagaaaactgcccccagtagttgcatgttaaactttgccagaatcagtttcccacctggccttaagtgctctgctctgtattggtgttgaccttaggcgtgagaaacatgtgactgtaatgaggatggatgctttctaaaagctcataaatagcaactttttcatactgaaatttgctctgttccattcttgcccttgtgactttacagatgttgtattctgccatgaaataggttatagaagcaggtttaaagtgaaggagactatgattcagctgccaaaccaaaagtgaaacctgtccatgtggatatagcagatgtcagtggaagaaaggtgtgcagaattgaaaagcttgctctccgtggtttgagaacacactgtcctcttgtgggcgtctctggcagcccatgatcggtacacttccttgaaccaaatagcctatcaaaatattatctaatacatttctacttttatttactcaatgagtaattactgagtgcctactacatgccaggaactgtggccctgatatgtttcaaaacccataaacatgcatctaacttatttatgtaggatctccatcaggcactatcttcttttaacctttccagtgaaggttaaactctgaccagaggaattgagcgtgtttacagaaaatcaggaatggaacagaattagactgcttttccccttacttcccactcccttacagcatgttccattggtacttgagtctagaggcatccagaggtgtaagaataaccaaacacaacaaagattaggagtaacgaagtgttttcatgcagtgccgcaccccagtgaggtgggctggctaaaaggatgtgatacaaactgatatccagggaatggcaaagaggagtagctgggcctgtccatcatctcttatcatgactcacagcccttgtttaaggaatttgaagtctaggtggatgaaagggacatcaaacttaaaatgcatagctgcaacctactagatagaagctgagaaccctatatgtggatcaggcagtcactactggagttcaggaggggaataaggcattggcccctagagaagacatcacagatcaaacttgagctagacttccttgaggacgggtaggatgtagatgataaagattcagcttcaggcagtaagaagtgaaaagaaacatactttttaaccagtatgtgttgagtggagggtggttatggggaagggagggtggcagggaaggctggatgcatttaaggctgtcgccaagtttttctgcttaaagagcatctgggcacagtggcacatggtctatattactcagggccctaagctcacctgagaagctccagcctcccttctgcaccttgcccacagaatgttctgtaacacttctctgtccttgcagataaataggctgccccaaatctagcgataccctcgatggtggcaggggtagtagcagtggcattggatgggacggtgggttggatatttccctttgtattggtcaaatacatgcacagatggcaccaacaccacggggatctctggagatgaaggtaggtatttcttcagtcactcagcacttaacaactgtcagagagggccgggcgtggtggcttatgcccgtaatcccagcactttgggaggccgaggcgggtggatcccgaggtcaggagattgagaccatcctggctaacacggtgaaaccctgtctctactaaaaatacaaaaaattagctgggcatggtggcgggcacctgtagtcccagctactcgggaggctgaggcaggagaatggcgagaacctgggaggcggagctggcagtgagccgagatggcgccactgcactccagcctgggcgacagagcgagactctgtctcaaaaaaaaacaaacaaaaaaaaccaaaaaaactgtcagagagataataggagaaatgtgcccctgcactcgcactgcacagcatgtgccggatcatctgtgaaatggatctttcctctgggagctccatcttttccaggtgattgttcacttggacatatttgattataagctcccagagtgtcagacacggacttctcatggcaagttagacgatcccaggtgcccagtgggtggcagtgcagtgagtggcaggaggaaaactttcctgctggcttttggtctgaccaagacagagtgatacttatccagggcctaaaataaccatagcaataggccttgccagaagggatctgtggcaggctcctggcactactggtcagttcccccagtggcctgttcaagtttttctttgcatgagacagaggttatggctgaggaaacagccaggccaggaggctagcctgccctgcagaagcccaggggaccttcctgatgccatctttctggtatgacagctcagcaggcctgtgtcaacaagccctgcacggtttggacaagatgtgagtgactaacgttttcctctggagcagcaggaatggatgggcctgctgggaagaatccctttgctgtgagctacctaagacgcctggctcctgaattgaaccagcaggtcccttctctgtatcttgcttgctttcctttaaaaaaaaaaaaatcctcagcagatgatgggaggaattatttgctgagtttgtccagactctgaatagcccttggtcactgaagtgtgcaaaaacatggcaacaatgcaggtgctatggtctgaaaatgtttgcaaaggaaggagaggaaagagcagttattctgacagtaaatgatacataatactaatattggaaggattattttttccctgtgtggtcagtgaatagaatttttggcagtcgtctatcatttaactaggtctgtatagagcacactggagcctggtaaggacctctggctttttttacagtcagagttttggtgcctaggggtctgggctgtggacaggcgagatgtacctgcaggcagggagtggtcagcttgctctcagcttgccagatccgtgactctgacgagagagttatcagtacctacagagcttcctcctgcagcctgcctacccacccaggccatcttctgacactgcctcaatgtgtccatgctccaggcaggtcagatcacctccctcattcggtttggacatcaaggagactgtgtgaatgaccatcagcctctctccagtctacccaaaggtatcaggtatccagcactattctgatggagaagcagtaagagtgagcctaccttagatctattaatagagctcattcagccaaggaaaaggatccaactaacccagatgactacatgagcctaggtcattcacatgtagctttggtgagtaatgagagatgcacgcatgatacccctgctcctgtcctttggtgccctgcacccctctcaggtgctctccagagtcagcccttctgactgcagggcagaccccaaaaggagatcagcttttcacctcgattacccctagtacttaagacatttgccttcatgagtttttggtaatcaatattgtacagccagtaatttaattttttcatggtatcaatctgatattaaagctctagtatctgggaagagcacagcaaagcttacctgactgactccactattatatttggaatggataattgagatataatttaaagggtagaatatattctttctataactgcaaaagtttgctataactcacaaaaggaaatacaaaattgagtaatagtgttggaggagaaggaagcaaatatttattttgtatctactatgtgccaaacactttatgtattgtattttgccctcagaaatcatatgcagatgattctattttacaagggaaagttgaggtttagagcaggtgagcaacatgccaagatggaacagaaggggcatagaacctggattcaagtcagagcagggtttacaccctcggtaccatttagatgtgggtcagataattctctgtggtggaggctgcatccctggcctctacccactagatgccagtggcatttcccccatttgtgacaacagaaaatgtctccaggccaggtgcggtggctcatgcctgtaatcccagcactttgggaggccgaggcgggcggatcacctgaggttgggagttcagagaccagcctgaccaacagggagaaaccctgtctctactaaaaatacaaaataagccggttgtggtggtgcatgcctgtaatcccagctactagggaggctgaggcaggagaatcacttgaacccgggaggcagaggttgcggtgagccgagattgcaccattacactccagcctgggcaacgagcgaaactctgtctcaacaaaaaaaaagagaagaaagaaaacatctccagacattgtcaaatgtcctctgagggtcaaaatcagacccgctgtggagacccatggctctagaggctttgttttttctgccatcacacactcggagggaaatttgggggtaactttaaggatgctatatggataacttatgtttcagtattttttcttatgaagataataaaagctgtcgtggatcatttcgaaaataaaataaagattgtttagaatcgtaccacctagagatacccactttcagcatttggctatgttttcttccagtctgttttctgtgcacacataggtagtttttaaaatcatacagtaaatcttttatctctttttatacttaatattatatcaagaacctatccctatattaaaatcagtgtaattatttttagtagctgcattatatcctattatatgtttatgcctcaatttactcaagcatttttgcaaatggccatttagagtttttccagtttatcccatcataaacacagcttcaatgaacatatttgtgcataaacgtttgtgtacagtcttgataaattctctggggtatatatttctatgaaaagaagaataattgggtcaagctctgtacctattgtttaggctgcatttcctacatactgtcaggttgctttctgtaagtgttggacttatatggctgtgctttctctctcacttgtttgtgggtgtcttgtctcacttgttaactataagtattaactttttaaagtattttaatttgataggcaaaaatggcatttcattgttttatttgtgtttatttgatgaccaatgaaacagaacatctcttcctattatatagctttttgcttttcttagtctctgaaatatttgttaatacgatgcattgcttctttattagatctaatttttgtctatccactttaagatttgtttctttccattttcacatgtagacttaaaactacagttctttaagctatttagcagcagtagaggaagacttgaggcaagttggaggagagatgaaggggagtgcttttgtataaattggagatcacctcaactatagaattaactgagccctgaagttggaagaagagggaagaatggcgagagaggaggtagtgcagaggtgtgcggtcaggatttcctgtaatggccaccaggtggtgccatctgcccgggacgatttgatgtctctggtgcaggagagcggagagctggggagagtattaataaggtggtcacaagcgaggtgattggagtgccattcatacatgtgggacattagttgggcctctgtaattaacctgtcaatgatcatgagttggtgcacgtgtgtttgtgtgtagagcggggaagagaagattagggctgttaaaaaaaaagaatatatatatatatatatatatatatatatatatatatatatatataatatataatatgttatatatacacatatgtatacatatatacatatataacatatataatatatgaatggcagctttattgagatataattcacatactatacaattcaacaatttaaagtatacaatgtaatggtttttggtatattcacatagtagtatcaattttagattttttattgccccaaaagaaactccattccccttagccattccccccatctctgcctccttactccttccctcagtctcctttccccagaccctggaaaccactactctactttctatgtctgtgaatttgcctcttctggacatttcatataaatggaatcagaataggtggtcttttgtggctgtcactgcttgtcctagccaatgctataccagcttgactttgtggcaggaggcatcagggtatccagatagacttactgttttaaaagaaacagcatttccaggctggctaggacagagaaaactacgtagaacaatacttttcctacctggtggatcatcagaattacctgggaagcttaaaatgaaagattcctggcccctaatctctccaggaattcaaatatggtagttccagggagtctgagctgcttgggatttttttcagtgccaccagtgattctaatgattgtctagctgtaagcagtgggactcaagttttgaacagaggcatgagaagaaaatggcatttccctgcagatgggctgtaccagctgcagcttcaagtccagtgcctcttgtgggaaaggagccactcccttgtcattcgccacatctacactgcaacgctggtttatgtcagactatcatctttgactcggcatgacaacagtgcatatttgaaggccatcaaaccaatgatattagccttgtttacggtttagctggaaaatatctcccatgtggtatagtaagaagagcactgaatttgaattctgaagctcaccagagtgttccactgactagtctcagggctactgtgagcacccagtgagagtggccatgagaggtgacacactgcacaagtcagggcactggaatcatgggacaagatgggaccttagagaatgtcttgtctgcctgcctcatttcatagtagagaaaatgaggccctgagaggtaaagttcttcactgaaggtcatacgccagctattagtagtgtagccagcaccagggtgtcctagcctttgcctccttctgtttctcactgtgccctccttccctacattgctctcttttgggatctgaggaatcatattcaatcacctttcattttcagaaatgaggaaacccaggcctcgtttgtccatggctacaaaactaattgatttatatttgctttggatgactaggagttaaaataatgacaggtgaaaaatccaagatggcgtttgtataccgcttttaagagcaatccacagcagattcaagttttgtgaggcctgaaactcatgcaatttgaaaacttttttcaagaaaaataacacacaattgcaaatgaaaagttaggttccaggccttggaagcagtctgcgcccatgaggggccctcattcacttcactataaatccacctccaggagcagtaataaagagatccctactcatgtttgtgctgctaggttcttctgtttgtataaatagcatgtgtcctgctaagtcacctccactcttataaaatggaggccattctgccaacacatgtgtattgaacatctctttatctgtaaggaatacagaagggaaccaagaaaggaaactaagctaccatctctaactcaggagatgaggcacaaaggcagaatggaggaattccctccctgctgtggtctgggccagggtgcctatgggagcccagcctctaggaggtctccagttttaatctcagataatcttcctcttgtagtcattcttctccctctgcctatcaaatgcagatgttgagatgagtaaaccctttggggtttttggatgaaaaacttttcaagatttacatgacatttttggggttgtgcctacccaaaaaagtcttatatctcacatcactgccttagaaatgaattaaaggtgcatttatccatcagggccacattcccctaaaatgcacctaatagcactgaaacaattagaataacacagggatcctgaataatccatgcctcttgtcaagaaatttttttctatttttatttttgtaaaacagcttccttatccagttgtgtttagtttatttaaacgatcacatcagcattaggttctggtttggggtttttttttttatttgtttgtttaagtctcgtttctgacactttctgaaagatgcaacatggagataggccaggagggaaactagttttagggtgttctcattacattcattttatgtcattttttattattaggtttacattattgaattcctgtggagaagaggagtcagagctgtgaataagtcataagtccctataggtaaaatcaagtactatttgtctctgatcaaaattgccctttccattgataggagaaatgactgggcctccttgtcatccagagttcattttgtttttcgtggcagtttcactgtctttgggaattgagctttttgaaatgttaaagcacgagaagcatgaacaccttggcagggtttgcagtatctccttctagtgcaggatggagggctccagagctggcaatttgaggaatggctggtggcttctgatgtcacctgccactcatgtgtccctccctgttttgaatcatggatctcaaacatcctcaaaagctcttccctggtaatttcaaaactctgaacaaatcaatcctaagaaaaaataaacaaacatgcagaagagcagaaggatatttaggatatggttctaattaaaatttttaagttttcctttttcaaaatcctgtatgagctattaaatagggaaaaacaaacttctgagtaggaaagaaataaaggccattacccttagagattttgaatcttacaataaacaaataggtcttcttttccccgaatgtttcttcttatcaacacaagggagttgagtgatggctacagctctaaaatactgaacatggctgcctactgaattcagcatacatacgtagggatatgttacataagatgcacatacatactttatttctattagcctgtgaaacagtgaacatgcctgctcttataaagcttctagtaaaggaactacaaaagaaacacatctactgggcattctcacactggctgaggtaggttggaaccatctggattcttgcctgtggcatagttaacctcgtgactatccagttttccaattatccaggcccatttacctctgctcccactcagcgagccctttggctatttctctgttcattggcacctaaagtcaaggagaaagaaacgaacatttattaagtgctatgtttgtaccagttaatcttctcaatgaagtattattatcacccctgttttacagagaaggaaactaatattcaaagaggtaagataacttgttcaggaccacatatgtttttaagtatagagctcatgcattataaagtgaccaccctagctaacatttattaagcacaatatttgccagaattcttgcaaaaagccttacaaggactattttattttatcctcataccaacggcttaaggatggtattacttaagtattcttgttttacagatgaggtcatacagctaaggtgatgaggccaatattcaaactcaagcatctggattgcaggctgcacttttgatcgccatgtctagcctcctctatacacctgctctgaccgatttggtattcaccacgcccaagaggctactgaacacctgaaatatggctggctggagttgtgatgtactctaagtataaactacacaccctatttggaagacagtatgcaaaaaagaatataaaaagtctctttggcaattctttatatcaattacatgttgaaatgataatttggatatattgggattaaaaattatttaatttcactatttctttttactttttgaagtgagaagactagacaatttaaaattacaaatgtagttcatattctatttctatagaacagcactgctatatactattttaaaataatatataaaggggactagaactgactcaggccaacattatttttcatcaatagttctagttaaaaatttggttggaagtgggtggatgggaaggttgaagcccatttttaaagataagtttggtgtttttatgaatttgagttatgtgtgctttcttcacccgttttaccatgtgtgggtaagagacttgccatttttaagaatcagaagaattctgtgaggtgtatttccagtgtctgtgtgtagtgctgcagctgtctgagcgtattgccggaggcacctcctttggactttaaggcacgaattgctcatcactgtccacacagctttgtggccgcctttgagtctatctcttttaacataacattgagttctggctccaggtctggcacaaagttgataataactagtgaatactgttttgtttggtttgttgtagttttattctttttttttttttgagacagagtctcactgtgtcgcccaggctggagtgcagtggcacagtctcggctcactgcagcctccgcctcctgggtgcaagtgattctcctgcctcagcctttcgagtaactgggactacaggcacacaccagcatgcctggataacttttttgtatttttattacagatggggtttcaccatgttggccaggctggtctcaaactcctgacctcaagtgatccacccgcttcggcctcccaaacttctgggattataggcatgagccaccggacccactttattcttaatacctattgccaggcagaggttacatggatataaaagagagaaattgggaatatttgtatgagatgggaaaccacaggccaggaaagcattaccaaagggttgtagaggatttagtctgggcccctccccaacgtacacaccacgtgccttctcctctcgaggctagaattaaccctcaccccaccaccagctgccaaaaaatagtagtagctgctgggaactcagaaacagaaaagaattttctatgagattactgtctaaaacaaatgtttattctagccatttataaagaacacttatggatttacagcagcttaggatagtgaaaaagaagtagaggaatggtaattaattcaggtacgaatttgtaaggccaagtgagaatcacgttccttgtcgtggcccaaaaggccttgtcagactcagatggagtctcctcgttttagtctacagacatatgggtggaagtgacatgatggaataattacattcccaagccgtgtacccaaaatctgtgctaggaccactcccctggccagtgcggaaccaggtcagctggtggaaggggctctgaatgggcacagcgctgccaggccctgccactcccacctcatcccatccagaatgggtccaacacagttcctgctaacccttatccacacctcctcaaccatagtccccagtgacctgcttcctctgtgaagcccaggctgactggaaggtgaccctcaacagaaaccatcagagagctttgggtctggggcggagggtcacctccactctcacggtggtgtcttggtgttaatgtcatctgttggctcagccattcattgcttctctcttccctaagctcctgcagatctcctttactcgtttcttaagtgtaggaagctatctccttggatgctgggtcactaattataaacttcctatgcatttacctggctctggtttggcccctaatgtctttatttctgcctgcaggattgtcattgccattgccccttttccttacctgggaacccgacatactctgcttatcccttgagctggcacaccagggggcctggaattcctgttggtgaagtcactactttaagagaattatcccagaaatcctctaagttgcaaatcctacaggagcagagtactacatgttaattagcactcattatcatgttagtagagaagcttacccaaaggaatgatacataggacctgctatgtcattgagaacagagaggtggggctcaggttctggacaaatgatgtcataagtaagtgtagtttcagaaaggaagatgaagtgggagctttagataattggaggcggtaggcctgtatatggaaccagatgctagagagcccaagtccatatttttactttttcacagttttgtgtccatatcctcaccgaatcccaaccaccaccaccacagttctatatcccgttattttttcaataataactgatacctcaacttaagctccactctgaccctcagctaagccatataatttcagcaagaattataaaataaagtttttaaaggacaaacatgagccttaaccttagtataaagacatgcttagccttcatacaaattgccaagttgagacttcatttcagacggcaaataaaagttacatgaaggagctaaaagtgctattgcaaattacctatttgaaacggctttttcaaaacctgctaaattcacacctctcctaaaaatgcttcacttccagattattttattttggggttttgtgtgtatgtgttagagggggtggggtttgtggtgactacagaaaaattagttaaattcataggataaaatttgaacttttgcaaatgagtaaacagccaaaacaaacaccgcttcagaaaaaaaaaaaaatacacgttttctccttttggaaagcaagcaatgcttaagcaaaataccttaaaagttaactaaaaagcttttctaaaataaacaactctgcttgtgatcctaaattgggaccacatgtagatgtgaaagctacaaatgcagtgcactcagaatttgcgtctctgccttcactgtttgcgtgcctctgagtagatgatgataatgttggctttggtccccaaggagcctgagttttttagatcctagtatgagggggaaaagcagaagaagaaagagaaggaatgaaaacaaatgcctttcaagacaaaatatccgaatgggtttcattttgcttatctgccaacaggctcaacccaatttagatctctcctacaaggacaggatagtgccagccagggtgtctgcccttgccggctatgtggggcagtccctgtgagggaccaggctcgaattcagagcagaaggatcactctagcaaactgccagggccagccctctgccctgaggcaagtcaatgaattagccaattcagcacagatagaatcattcctttgtttttctcaattaccaaatgctgtgtgctttgggggtcacttgtcatgtgagtttagagaatgtggatattgcaacataaaccctcaccattctaaacagcttaaactaaattctgttactagggaggagagctgaggtgataatatccatctctaagtataaactattgtgtgttcattttcccattatgggagacaaatttctcttctccgctagtgctcatgatctcttccaccaggcacaaacatcagatgtgtgtttatgtggacatattttgtcccctattattggagagcaagctccttgagagaagggattatgctgcctggatttgtaactttgttaggcaaagcatgactttatttagttttgaattgatgaggaggcactgatgttagtaaaaagctcaaatgtcctgagccctgttgctcaatacctcaaacacaggaccatgatcaccacaatgaaaaatatgcaggatcattaatttcggctctgttaattgtgctgttaggaaatgttgactagataggaaaagcagctaacgttcatggagtgcttattacataccaggtactgaggtaagcattttacatacagtatccgatttgtatcctcccacaagcatgttatccccgggttaaaaggggaggaattggggtccagtgagattgggaggttatgagaatcccacagtgtgtggcagaatgtggacttgaactcagggccctaacaacaggaagctataaaagcctctttgtataaaaagtgctctctttctgtgggtcctcagtaaatgaaaatatttgcttttcataaataggtttgaatgttgggaccctcatttctcaccaggagtcaaggccaaaaggtcttataaataagagtgaattttgagaaaggatgtgtgaaaatgactctgttcttttcttttatctcacttcagttacttgggatggaggaagcagaaactgggagtcagacatctaaaatatgaagttccaccctcatgttggccatttctttcagcctcctttccccattcctaggggccaatctgtttctccctctcctgctctttctctttgcctctgtcttcttctttcctgtggagacaatagcgtgtggtggaactgcctgagtgcttactgagaaggagaaaccaagcgcagattgtatagaagctgacgaatgagtcctctgattgtggacaagtgatggcgctttttgtaaaattgtgtatgtgtttacctcaagtagtgaaaaaaaaaaaagaaaaaacaacttttggggcaagttggaccttaggaaggagatttctgggtctcggggtttctcttagcccccagtgcctggtgcctgcggccggtgtcgcctcagggagtcccaggctgttctgtggcctccagaaggagccaccccgccccttcctcgccccactccgctttgccttcccttagcctggggagccttgccgcctctccaccttctctcctggtctcctcgggcgctctcgcgctggcaccttcagctctgtcagagtctgaggggaaaccaaaggaggccaggcggtgtctggaatgccccatccgactgcttcaggctcccagaccgctgacaaaaggaaaactggtccgtcgctttctgaatgatgtatcgagaccgcagtgtatttttagcatctgctgtttgtggtaacataagtgaaaactgctggacccgttcccttcagctgaatggctggtattcaggggcctgtgcccgctccctgccagacgctcctcacagaactccctttttacgaggtgggcgactggctccctggcaccaggctgccccaccacaattctttattgcccagcgccagtgcccaattgcatgaatccccagggctgcaggcagcgtgaggggtgcgaatgggacgatgctggctgcgggcttgtcagggtgttcccaagttgtgtggcagagtctggagggcaggggttgtccggatgttccaaacctccagcgtgaggtgggcactcaggtgcgaaggaaccatggtggcgaggcccacaggtggcgtcccatcccagagccattttgccggggcctggctctgcagtagtcactgacaccggagatcccctgagtgacctggaaactatgagagaccccaggtaccccgacaggtcattctactaactgtggctgtggagctccagctcatctttggaagacggaaacgcactggaaagggtatgaatggacgcagaaggcctcgtgggggctctctcagtgccactgtagagtgaacacagggctggaatccaaaatagcaccaacttgctgagtggctttaggcaagaaacctttccccaggtctcactttctcacttagaatgatgaatagtgattcttgtcctactgacctcactaggacgtttttaataaggatgaaagcactttgaaactgttgaaaccataacatcacaaaaaaaaaaaaaaaaaaaagagacagagtgacgaagtaacgcaggtcccatttatgttcttaatttctgaccaaccttaacttccatcaaaactgcttccactagccccagccaggagagccgttgcatcgtggtgggacatcatcaggctctccaacggacatcgcttatactatgagaactcacgttcaagggaggtgtttacctctaattcccacagaactagcgtaagtaaaaaatggggcagcaggatcctttccttgcaaagtgtgagcaagtgcctctgtagagtaaaactttaagtaaaaggactacaacggcagtgacagctcctttatctgaaactgcagacttttaagaaggttcttagcagccacaccgatgtcacaaattccataaagcaagatcacctaggcactctctcggagctaattttatctcattttatatataattttaataagcctggctctctcattttctagccccttattactgaaaatgtggctcatggaccagcagcatctgcactatctgggagcttgtgaggaatgcagaatctcaggccccacccttcaccttgaatcagaatccacatttggataagatccccgtgtgtgtgtgtgtgtgtgtgtgtgtgtgtgtgtgttgtgcgggggagggtaaaattagaagagacttgcagggcctaggcgcactctcaatttattgtatttcattatggaaaggatttgggatgactagaattaataacttagaaggagtgaggtgacaaagaacattaaaaactattgcatctgggaccatttaatataggtttgtttgtttgtttgttttgagacggagtctcactttgccgcccaggctggagtgcagtggcatgatctcggttcactgcaacctctactccccaagttcaagtgattctcctgcctcagcctcctgagtagttgggattacaggcgcctgcctgtaattgtatttttagtagaaatggggtttcaccatcttggccaggctggtcttgaactcctaaccttgtgatccacccgcctctgcctcccaaagtgctggcattataggtgtgagccaccgcacccggcccatttaatatagttttatatccgaatgccctttaatactctgagaatacactgttacaacactgtatagtcattgatattcccagtaatagtcccaaattatcaagaacaggcaaagtcatattctcctgctgtttaaagtatttacctaatgttcatagtggaaaattctcctttaaaatggttaaataaatcttgatcttaaaccgatgcttcagtgatctgaatactacatgaaacagcacgttctctctaaagagataagtgagatggtactataatcggaaacctctgttaattcggattttgttttttatgcacattttagagagtcaaattatatcaagataaaatatgataacagagatttactctaaaattaaacaatgaaaaaaaccctaccagtgcaacaaaaaggccatggctgttcagagccaagtaaaactttgggggtcagaaggtatttaattttcatatttctgtttactaggtactaacaactgatcttcaaaatcatagagacaggaaaatggatttgaaacccaagggagtttttaagtaaccagaaaagttagtgccctcttctggacaagcgatcattggagttgttagaggttgtccttgggagtgctgttgggggctttgttaacaccgaacaagaccatgagtggcaaaacttggagctgaggttgatcaggtctccaaggccagggagagactcaaaccaaccaggtcaacttcccagctgaattgccaacctcaaagggatacgtacagaagggagaattggaggcacatagcagagggtgagaatgcagagaagagcaggatgcggtcaaaagattggcagatttttatggagggttccagcacaggccaagaaagagatttaagggttctgactcaaataagaccaactgtccttctttctcattcccttgacaattacatctgagtgcaactttattgccatggcaatacaaagaaagtctaccaatgatttgatatctagagcttagaaataaacagctgcatggtaccaattttattatataaagcaaagtttatataaacgcaactgggcttaaaactcatttggcaagaattaaatattttccatttattctagagacatttttagagtgccatggctgtggtggaaacataaataaagcatcatcacaggacaggattaattaattgcctgaaataatttcaaagctgtaagtgaaagatcctatctttattaatggtattcttttctcaaatcagattttgaaacctcacaagcttttgactcatctctctcctgtgcactgctagaaatcttatttaactcatgttgcagccaccctaattccaatccttgtcacttcactcctgagtttcagcaacactcttagagaagaacttcttaatttctctccaacctagctttgtacaatggtctgttctctataccaccatctattgtctatactacaatacattatgttgggaatatatcttattatgtactactggcttattgtgttagtcatgggtaaccaactagaatgaagaacgaactagagaacaggaactatgtctttcacatttatgtcgtctatagcacctaacgtaattattgctacacagtatgttgctacagggagtcttccgtggcctagatctgggctagatacttctcctctacacaactgtgacacactgccgtatcctggttacattatcagtgcattacaactggctgtattacgtttgtttctttttgtttctctatgaactatgagagcagagcctacatttatctggttcatcactgaccctctagtacctagcccaggttttgattatatattatgtgctcaatgcatatttttagattatttgttgttggttagtgcagtaagatagttaaggaggctgggatgaatagaccaaatggcatccatagcatcatattattttgtttgacttggcttcaggtacaatagatcaatataacctaaatattataatgaaccagataactgcatttggccctttgcaactgtataatattaaaattattatattttctatacctgtttaattgtctataaaattctagctcctggagtgcaaaggacagcattttttacttctgcatatctccctcagttcctacctcagtgagtgtttcttgatctgacatcattaaatgcagtttaaaaagagtctgtgttctaatctgtctgcttagtgctaaacatctgttgcttcctaacaagtgctgcattcattttaatggcactggtgcacagaggtaaacggagctttggcaggccttccataagagaaactgtttgcttccttcattaattactaatggagcattaagacacgcattctgccttgagccaagttggataattcctggcacttaatgctagggtgctttcaaaagttgagacatgtactgacacaccagagagcctgccctatagcaagcacagtggtgtctatagtgccaacattatataaagcttcaaatatatcaataccaagtgtactgatatgtctaacctttgcatctattgggttaatgtggaatcataggtatccctacactagctctgaaggtagctatcacaaatgagctggatgaatcatcagaaagatacagaaaggttaaaaataaaaggataatcaaagatttaccaattaaacacaaatcaacagagtgagagtggcaagctaatagaactataaatcaacatctgatttatcaatttatatttagcagccaattgccaacacaattaaaatgaaacatttatacccttggatatgctaactagtacagcatcaaaatgataaaaacagtaagaaataagagaatgacagtcacttattgttagtagtagattttaacatatagccatcagattatgatagactagagataaaatatgaatatggatataaaaagaatataattataaatgttgataaattggctatatttagatgtttatgggttatataaaataccttatattacatattcacatggaaattttacaaaaataatatggtagtttacaaaagaaatagcattttttttaaatgcagatattttacagtttctctcattacaaagcagtgacctagatctgggctagatacttctcatcattctcattacaaagcaatgaaatataatataaatgtaaacaaaacaagcgaacaaccactcgatgttgcctgaatgcgggggctagaggaatcagcagaggtaagattgtccttttaaggttaaactttaatcaacacagcacacaaagccagagtgatgcaatgtcacttcagagagaaaatatgatccccaggacactgagatctagtcatgattctactgaatatattaacatttccaatgggggaaaaaagtgtgaatccaacgaagagctggctcagccaaaacaaacaaaggcaagtgctagtgttcatccagggacaagggagcctcattcaactagacttaactaatccagcctgtggcaggatcctccttcatgagaagatggaagcatggtgttgtttttgcctggttttgctcaaatgtcatgcacaccaggcaccttttgattgtaaaccagcctttcctgtattggtctgcgtacaccatgattgtcccttaggggaactgtgagtgtggggctcctctgtcctcatggagttggtaagtatgaaatccttctaagaaatgatctgctgtggtcctggaaaaggaagcttcatgagccttatagaatgttaaggctacaaggaaagaaagtccagaaattaacatacattggtatgttaacttggtaacttagtaaaacaagttatggagtagaagttgttcttattcactgctgtgttttggtgctcagaataggttttcgtatgtatgagacacttaagtatttggtagagacatgaaacaagtaggaaaggacagaattatttagcaaatgctggtgggataattgattaactgtttgacatacactgaaataaataacatggattaaagagttaacttacaaatagaaaattaaaagaatgatccaaatgtcagtagtacttctgaaggggcaacgattttgtgcatttagaaggataagaagaaatcacaaggggaataaaaatgacaaatctgactacataaatattaaaaacgtatgttagcaaaatactataatagtaaccagaattcaaactcagacaacatgggaaaatattttcagaaaatgcgacagccaaaggccttgcatctttattatgtaaaatgttcatacaaattgataagaaaaacactgaaattccaagagcataaacaaacagctcacataaaagaaattaaaattagtaaatatatgggaagatatttgacccagctggtaatcaaagacattcaaaataaaacagtaattttaaaaaatttgaattagcaaagaaaatctaaaaattgattttcataaaacccaatgcttgtgagaatgttgcaaaagttgtatttcatattttgctgctgatggcttataaattggtacctcgtttttggaaaacagtttggcaatacaatatcaagagtcattaaaatgttttatagcctttgacctagtaatttgacttctgggaatctatcctgaggaaaattaatccaaaatatggaaaacattaaatgtctaaaatgaattgggaaacactaaatgtctcacaataggggattggttaatatgttgtagtacagccattggactaaaaactacatagccatttataattacaggaatagagaccatgcagccaaatggaaagatgcttgtgcttcaatattaaatagaaatgaatatatacttagtataaaaagatacgtagcaacaattggagtcaatacaccaaattttaagtggttgagctaaaatagcaggataacagtgaccttatcttttttcataatgtgctttcagcctgtatttctggatggcaattgccttcctttcttgacccaagtcctgcccaagctccacgcccagcttccagagccctacccatctgtgttgatgccacttagtttccagcttttccaagaagccctcccatcccatcagccaaatggaactctccctttcccatgctctttttttttttctttttttgagacagagttttgctctgtcgctcaggctggagtgcagtggcatgatcttggctcactgcaacctccacttctcgggttcaagtgattctcctgcctcagcctcttgagtagctgggattacaggcacctgccaccatgcctggctagtttttgtatttttgttttttagtagagccggggtttcattatgttggccaggctggtcttgcacttagacctcaggtgattcgcctacctcggcttcgcaaagtgctgcaatgacaggcatgagccaccaggcctggcccctttcccatgctcttgtgatgctgtattaacatttcttttacaggataatatacagtttgccttgtatggaaataatatgtgtacagtatgtgtctgtttctgcaactaaatttctaaacccctagagggcaagaaccatttcatttatttttctctccccacagcagaaggcacagggcttttcctgtgtgatatgcctgaataaatattggttgaaattaattgaattgcactgcaatgaactacttctgattccctcgcaggtggagctcatgaaggacttcagcatttgggtccttttggcaacatccccaacatcgtggcagagttgactggagacaacattcctaaggactttagtgaggatcaggggtacccagaccctccaaatccctgtcctgttggaaaaacaggtaacagatatgcctttgggttcccatgaaaagttggggctttggaaggaaatcagaaattctaacatcagctacaaatattcccagaaattgttatttccattctgatgagcccatgtgtatttgtaagtagatgggaaggggaaatttattctagaatttttatatgagctctgtgttcagacacacccacataggattttcccttgccaaggctttactttctttctgtgtctccccttctttgggaattgatgcacttttctgcacttgctactctttttttttttttttttttgagacaaagtctcgctgtgtcacccaggctggagtgcagtggtgtgatcttggtgcactgcacgctccgcctcccaggttcatgccattctcctgcctcagcctcccgagtacctgggactacaggcgcctgccaccactcctggctaatttttttttgtatttttagtagagacggggattcagcgtgttagccaggatggtctcaatctcctgacctcatgatccaccctcctcggcctcccaaagtgctgggattacagtcgtgagccactgcgcccggcctgcacttgctactcttttaatgaaaggggaaacacttttttttccttttccatgatacaacttctgctgagttttaatgtctttggaactagttagtttgtggattatccatgcctgtttgttctcctcgttgatcatgacagtcaacattctaacagtgtcatgcatcaacaccgagttagcatctatcctaaaatcctgtttatttgggggccaggaggtggcatgggagagaagaggttcaggaagaagctggttaaggaagaaggttgaaattttccatgttgttcatgcatcccacccactttcctacccactaatgccatagagaatggtgagtgggcttcacttacatccggctttgagcagctgaccttggtggttaagagtagtggctctagactctgactacctgagttcaaactccaggtcaacctgtgtgaccttaaacaagttaattaaccacttcgtacctcaatttccttatttgcaaaatggaggtcattgtgggaattaaataaaattatccatgtaaagcattttagcacagcacctagcacagagtaaggactctttaaatgtcatcctgattataattagctttgctgcccctagtaaataatgcacctcttaccttgggcttgtgttagcttctagcaccagagtagtcttttcctgcaagcctaataataataatagttggtatttatcaggttggtgcaaaagtaattgcactttttactattgctttcaataggaaaaactgcaatacttttgcaccaatctaatattatttctactttatattaagaaaacagaagcttagagagtagcttgcataaggttatccaggtaacaagtagctgaaccaagactcaaacccaagtctacctgattaaggactgtgtactcaaccaccaggacatactgccttgctctgaaaattgtgataacattgactactcaactttttttctttttctttttcttttttttttttttgagatagggtcttactttgttgcccaggtgggagtgtagtggcacaattatagtaattctgtgcctcagccttccaagtagctgggacaacaggtgtgtgccaccatgcccagctaatttttaaattttttgtagaggtggggtctcattatgttgcccaggctaaactcaaacttcagagctcaaacgatcctcccaccttggccttccaaggtgctgggattatgggtgtgagctaccacaccgagacttttttttcttatgatacccataactagtctgacatcagcttttcttaaacacaatgcaggctgtctctgaaagagactgtcttagaaaatatgctcctcctttcatttaggatgaggcctctgttttccgtggggcacaaagcttccatcttgaggcagaacaaccaaagtagttggatgtgaccaagccaatgtgtggctgctgggccaggaaggcaggaaaacctgaatccctgcctggctctaatcatttcagccaccttctacttgtttgtagggttttggatgggtaggaagaaagactagttcagagtttagagagcgacagtctccattgttaagtccattggatgtggtacagtgcagtggttcttaaagtgtgattccaggaccaccagcagcagcagcacctgaaaacttgctaaaaatgcaacttctcagtccctaccctgattcaacctattgaatcagaagattctgggggtgggacccaggaatttgttgcaaccagtcctcctcatggttctagtgcacactgaacttagagaatattataggagaatggaaagaggtccagagtttgagccaagagatctgacctctagtgttgactgtagtatgccactttcactttcttgagccttaatgtcttcacctatggaaggaagacataggcaatgcctccaaagagcatacagtgtagttctagcttgtctgaaaacaaaaacaataaaaacacaaaatcatacagacctgtggaatcaagctctagtctgtgcacttaggagctctgagaggacagcaatcaagctggcctggtagaattggacaaaatcccaaatccagacactttcttgtcacaggttgtctgccatttcctttgctgttcttccatgaaactaacatattccctcattctttgttctgccacaatctgcattccaagaatgaaatcgcttgctaaatttagccattatttgtgaggaattgcttgaattatgacacaacacagcacagttgagcaatccaagaataaaaccttgatttctcctttcatgccatgctgtcctctgaatcatggcccactcaccctggatagagcagcagagctcaaagagtccatctcagcctcagagataggatgtgaattctagggcacatttttaagcccggagacaccttcggttcccagagcaggctttatctgcatctcagtcagggcccactcagaggtacaccagaaacaattatgaaaggttataaaggtgccatatgcagattgcctgaactctcttgaattggtatattttcctacatgttaattgctatatattgtgtaagttagataaatagctcactgaaaagtggagagccgcattagggatttgttcagaatgctgatgacttccacactagctgtatactgctaagagctgagagactgtgtactgaaagcttaagagcagtgtcaagaactagacaacctggctaattgtaaatggcccccctttcagcattgactttgatgtctcattatgtctttcaaatgagaccctccttcttccccctaaccctgcacaaaattcacaatccctcctctgtccccctttttattgctgttgtctaaaatatattagacatgggaaaaatgactcatttttagagcatcatgcctagtaataatagaatttacataaaagcagcatctgagagagatagccttctttctttggtttcaatggaaaacttgcttgatttcaaagggcagtcatagtataaactgtcagtcaaagggagataatgggaagggaactaaaacatattgcaaacctattatgtgccgggtgttctaaatgtaatcatctctattcctcacagcaatcccgtaggtaagtatttgattatttgcatctcacacatacatgaacaaacttggagagaccaagttaactttccaaaggaactaagcctatctatatcttaggagctgggatttgatccttgagctctgctcttgtctgactccaaagcttaagctgttatcacaataaaacacaacatcaagtgctgtgtggagattgttgttgttgtgtaatgtactttctccaagaagccaaagtagtttctaaactgcttgctcaggagaaaacagagtgggtcatgtgcaacagaagtatgttacctaaggaaacacttgctcttgtaacaaataaaaacattgtatggctcaacgcaatagaagtttatttttcacccgtgtgaagtcctgccagaggcgcgtgaggctgtagtgcggtggatggttcggcaccccagactgccatctttacacttgacccccacagttgccctggcaacatgtaacaagctgaccaggagatgggggtggggaatgaggagaagtggagcatggtatgagaggtttttatgcttttaggtgatgtatttcaattccaggcctgggaatggaatacattacttgtgcccacattctgttggcctccactcaggcaaatgactccacgtgattgcaaagcaaggctgggaaattagtctagctgggtgctaaggaggaaagggaagtgggtttggtgaacagccagtgagtctctgcacaggagtgggagtttgagatgagtaatcctatctaactggatcctagagggaaggtggctgctagtgttctaagttactactgatgtgaacagattctgacctttggctgcctagttgtttttgataaattaactcttagaataatgatgaatgtcttggccgttcctcaaaaacctttggctgtttgcagcagatgatggatgtctagaaaacacccctgacactgcagagttcagtcgagagttccagttgcaccagcatctctttgatccggaacatgactatccaggcttgggcaagtgggtaagtcctatctcaattgttagtagattttgcactttggtactctgaaggtgctgatggcagggatgagcaatatgggcagaaggagagaagaaaaattatttagaagctaatttttcagaaatctctggttgacagagcttcaagtcatgactactcaaaaccacacttatgtgtccaggcagcactataccaaatccaactaaagagacagcaacctaacattgaccatagtctccagagtcttctactctggtctgcttcacagcctgtgtcatacacatcctaaatttcaccagtgtttcatgcatctctatagggttttatcaaaggatatgattttttttaattgacacagaaaatttgcaaatgtgatctctaaactaagggagatgatctctgcagaatcaagggaataaagatgccagagcttagaaacagatatatataattctgctttatagaaagagaaaaaatattccgtgatgtgtagcagtgagattgctgtcagtcctaggtaagtgcatatagctgtcagttaagggagttgtttataagcacttggaaagataaatcatgaccatttggcatcagtgtgctaaaaacaagtcttgccaatctaattatattcttccatttgccagcattattcatttatttgccagcttgatgagggaaatgcagtgggcatggtgcatttggacttttgcaaagcatttgacaagatcgttttatgttcccctattggaagaggtggaaagatacagcctaggcaacagaatgtcaccaaaatggggcttgttaaagagtccatgtaaatagggagggagatttcacatggtattctgtgtgtcttagcactaccccactccacatttttatcaatgtttgtaataatatagaacttgtacttatcagattcccagaggatgacatgaagttggaagagataccatcagatgacagagttgggattcaagaagatcccagcagactagaacaatgagccaaacaagatcagaactgagtggggatatgtctgtgtttctgtggttgggccagatgctgaagccatgggagaaaagtggggaaatacctaggagtgttccttcacatgtaacagtaggtggccagtacgtctgtggaatgaatgagtgagtgaatgagcaaatattccaactccctcagcccttctaaagtcctcatctcttcttagctcattattggcagatggccttgcttactgctttactgggaacactgaaatttcaaaactaaactccctcctttcctcctacattgttttagagaaatcttcattaatgaccacttttatttttttcagcgtcttgctttaacatgcattgtcagttccctctgtcttcaacatacacacatttcctgtcttaaaacaacaaagcaacaacattcctaagttaattttgcttcttccaatttgcattattccatttccttctttttcataaacagttctgtttggaagaattggtttgtggagccactttcaagcctagtagtagagcttaaacatgttgaattaaatagaaaaacatctataggttctcgaataggagactgaaataataaaagccttctataaaagaagttattttgatggcatattaaaggatgaagtaaaaggagaagagactaaccctagacaggaagaaaatatggggagtcatttcagttatgatgactgtgaacaccgtgaagaagggtgagaatccaagacattttaaagggggaaaaactaactagaattggtatacggaataaatataacatgaagaagaaagaagagatatgtcaggttcatatgaaatggacaatatgaactttttctttgaatgcattttagaaagaaagaaaagagaggaatagagggaggaaggacataaaaaagagaagagagagtgagggaaagagtagattgcggaggagtactgggaagagatccacaagaggtgatcgaagcattgccaaacagaagcaaaagccaggttcgataaggcacaaagagaacacattgagcctgctgtgttccaggcactgtgctagatgctcagtatgcaggagtcatcaggacatggtgctggtcttcagagagcttatagtcccacggttgagatgaattgcatgaaaatgaaatgaacccaacttagcaccgctccacttcatgtttcgtctgtattctgagggccaggggcaattattagggaagatggaagacaagggtagaggaagatccagaactgaggactggtgtggctgattggggtagtagccacagaggaagtcaaaggcactaaggagggcagcactgaagtttcaggtgggaaagtcttcagcttcaccagtaggctaggaatgagagaaagaaaggagggagactgagtcaaggtgtgagtgaaggcaaggagcccagttggtggcatgatgaggtgggagggatgaaaacatctcttttcagctctcttcatctcttcttgaaaatcttcacagatttctctcatcaaattccactcacttccagtgccccagtatgaggccaaccacggtccttcattctctgtgcttccttctcgaaacactgacttgagtttctctcagtgtttcctattctttgtccacattagagctaaagactagaatctaggatcaaatgtaaaaggaaaatattagagatcaatgaccaggaacaatgtttagataccttttatcatctgcaattatgtgtttacttaaacttaggtctccttgtttattttctcattactacctaccagtaaaacattgtttccttggttttcacatggaagtgggaattgagtatgtcttgcttttctaaactgggaaccacaaaccttcctcagtgcttatatggaatgacagtctcaagcttgtcttcagcccagccatcctttaagttaacagagtcatcatctttcatgatagaacagcacaaagaccctgcttccttatctgctaataacgcttccttgtttttgacagtagctggagctgagctgcatctttaacagtgattcacatattacacatttcagtgtctgtcttgtttcctgcatttctctcttcgttagtgcatcaagacacatttattaacgacacatcatatgccttccgggccccgtgttaggtaatgggaatacaaagatgaatgataatagtaattgtattacataatacataatactatataatacaatagtaaatagtaatatttattgaccacatactatatgccagactcctttctaaatactcagtaatcttattcaatctgcccatccttgtcattctcactttccagatgagaaaatgcaggcttggggagctgaggagcctgctcagcccacagagctgggatttgaaccccatcatctgactccagagtactttacaagctgaatacattccctatcttttcatggctcattgctcctaacctgtcctgtgtggtagtcctattgagtcctaccgagggctggctgccttccagacaatgtgtgtgactacaccagtggtgaccacaccaatggctggctcctgtacatgccagctacccactccccctttacacattaactgctgagtgttatttacttaagaaaaagttgtctcaaaaagcaaatatttttcctttccaaatgctttcacaccttttcatcagtagctgatcacagccagagcctgagccacggggatatgagggaccagacccctccctgacttgctttgtcattcctgaccttaacatgtttgatgagttgaatgctcttcaatgtggatttgactcaggtttccatgtgattagacctgcttagtattttatgtcctacttagtattttacatcagcaagcacatgatgtcagggaagtttgtctcatgactggcagtgttcactttgttaaggtgctgccctccaggtttctctggtgtaaaattcccttagaaattaataggccgggcacagtggctcacacctgtaatcccagcactttgggaggccgaggcaggcggatcatgaggtcaggagatcgagaccatcctggctaacacagtgaaaccccgtctctactaaaaatacaaaaaaattagccgggcgcggtggcgggtgcctgtagtcccagctacttgggaggctgaggcaggagaatggcgtgaacccaggaggcggagcttgcagcgagccgagatagtgccactgcagtccggcctgggcaaaagagcaagactccgtctcaaaaaaaaaaaaaaaagaaattaatagttactctgtgggaagaagttttggggctgtgtaaatattctgctcctcgttcaacttttaaccaacaaatataacatccattgatgatgcttaccagattcaataatgatgatagctgcaaaatgatgattttcttactccgctattctttctgcatttactagttgacattctattctaagcaagagtttcccctgctgttctatttatttatttatttataaatgtgtttatttatatagtataagtatggattcatggattccataatgcatattattatgtattctggtgttcaaactgtcctaaatttggccagtgcgagtctcctcaagctttcttttctttccttttgacaggacctcatcatttttttgagcacttctttattttctgacctaattagctattccatcttcacccatccttgcactttccttcctagccctggaattagacttttctccaggaagctccctggctgtatttaggagtgtaatttgaaaccaggatctggacagttgtccaaaatcttgatggcactatggaaagcccttttaatgaacttgaacctgctactcacatggaaaacaggctcaccactccccaaggaatcaacaaggaatgggcgtgaggagagatagctgatttcttttcattcaatttgtatgcttctcttacccataccatacctgccaatgccttcaagtccatacaataatagggctaattaagaatgtcccagacactttcatgcaggggtagggaagcattatcctgctaatcctaaccctagctcttaaggagacacagggaccatctttgagaggaagattagccaggccttttgcatttcttttttttttttttttttgagacggagtctcgctctgtcccccaggctggagtgcagtggcgcaatctcagctcactgcaagctctgcctcctgggttcatgccattctcctgcctcagcctcctgagtagctgggactacaggcgcccgccaccacgcccggctaattttttgtagttttagtagagacggggtttcaccgtgttagccgggatggtctcgatctcctgacctcgtgatcctcccacctcggcctcccaaagtgctggggcacatttctttttgaatgaagactcttatgggtaggatctgcccccaagatctcctaaagaattaaatgatgctggctttacctggctgatggcacagtggaactctgccagagctggctgacagtcccaccccatggtagtagctctcaggttcttccacactccatccagctcaggcagctgaaaacaatggtacacatgaagaagacatgtcctcaccccttcccggccttcccagctctaacaccagctcttcggatattctctgcctcaggagtttttacgttcacagaaaggcaaccacagactgtagagaatgagcctcacagcaatatcctcattcctcaaggaaatgatctgcaagtctgccttttctcccttccgatattaaattgatttattccccaagtgagcaggagatagaggctgtagccagtactggtgtttttggtagtagaggctccttcactctggcaccgcctccttgcatagttgaggttgggcaagagatatgcattgtaaattgcaggtggggtagattttaatgaacgtgaaaaatgatgaagctcattcttggcatttgtcattttcaattccaaatctatcactaaaaataagtctttataagtggacagctcagaggatacatgttgtataaacttgttccttaccagaactctgtggttgtctttgttttttttttttcttaatgtcagagtattttatttagaacaaaacgaatcacctcttttatacatcattttcctccagataaaaaaaatcaaataaataaaacaacacaagtaaagcccccccccaccgccaccaaatccccttctccctttctgccttcaggttaagtgttctgtcttttataatctcaatagaagggaaatctgttgagcatgtgtctgatattctagagctcattgaagcccactatgtgtttgaaatacagcaatgtgtggaaacacttacacaaactgtggtaacagagccctgccccccgacccaacataactttcctttctgccaagaagttttttggcagtttttaaaaggttcactctattaaaaatgttatagaccaaatggttttccaattgtcttgactgggggcactgacttaacgccacagacaaaatggttgcagaagtcagaatgtctcgtttatttacacaggggattgttgttaatagtcagacgctactctagagagcagtttataaaaagggagttagatacaaaaataaatgagataaaatcatttgttttaaacaaaggctgttcaaagtgaggagatgggtttccagcacccttcatgttttaaaatgtcgtatttccctgtttatgtgattgttgatgacactggtgtgcctcagggcattgcagaggactttattaaaagccgaaccaccaccagctttactcttgtggtctatctttctgacacgacattcctttcatctagttttgtttccaaaatatgcgtatgcaaatatctaggggacacaccaagtattgcttttaaaatagacattcaccaaatttgatccatacttctgcattttttgttttcttttctccccattctagaacaagaaactcctttacgagaagatgaagggaggagagagacgaaagcggagggtaacacgtgcctggctggattgttgcggggatgcttggagctttctgagtggggcagtgaacaggctgaaaccctcgcttgttgggaagtcacagaatcctcccttgtgtagtcctgagaaacactggtccatgtgacaagggccacacccagaaagtctgtccttggtttctgcgatggcttccccaggctttagcagatgatttttagtggaacgcgcagtctgtagcaattctagcaactccattccgttcaggaaatgtgtattgcttcccccatcagtgtgggacatatctggggggacatgagggtctgtctgccctcccagggtctgtaggccagtggggaaaaactgatcacacatctgcatcaattctataaaaacacaggacagaaacagggaagtgctgaactgcatgctccaggaaataactttgaaggaattcgggagcaaaagatgagatgaacaaacttaatttctcctatgtatctttttttcttggcctagccagactgatgtaaaatctactagatctgtaatatttgtttgctgtctgttgaatttactgcaggcttagtttttaaccatcccagggctgcccaaggtaggaacttggtctagatactccacatttagctacttcatatacagtgttgcctcacgtaaaactcaatgtcacatttgctttggctttccagggtattttatagcatcaagacttgataagtgatcaaggtccattctgctaatccactggtaccttactagtcagaagggcctggccacctacctccttctttatctgatcagatgaaagtgggagaaaaaacaaccccactgttacatggtaaaatgctatgagatagtgaccattttagttaaaacatacaaacctaagcacgtactcaaagccactgactatttattcagaagagcaagtgcctggatcctcacaaaatttgggaatctgggcagtggtaattgtggccattctgaagggttttgccaaatccggtcagagagagcttcaagaggtgtggattttctggcctcagcatcagtcctcaggcccccacaacagaaggttccaagcccctgtactgcctgacaaaacacagaagacatacagcaattttctacgcgagaagtagaaaatttttacctctggaaacaaatcttttttgaggagagttaacagagttattaggggtttttcttggtgattacagcttccaatagcagatggtgacagaaagggtccaaagggtataatgtggtcttgagggaacatcaagaaattctattctaggaactcaaaatacacataatttaccagtaacacggcttgaatatctccctacaacacaacaagaacatttccaaataagagcaatgactgacccaaaatcaataacttagcttgaaactttaattgtctctacttcctggcccaccattccttctgccctgactcagtgaatgaccatggtcacgatttaggtcatttttccgtgagactagtgattaccaaaactcagaatgctggctaagacacatgctataaaggattttactttagcctcaatttcctccacataggaaaggcttagaatttaggaaaagaagggtcactttgacccagagatatcaagttcttcctgttcttgggcatctacaaagacccattctcatgccataaaccatgggcctctctggattgataaggaagcacgttggccctgcccatcatgaggtctcagatgatgttcccatcttgattaaagacattaacactgccccaccaccacccccagtacatgaatcaatataaagaaactatacgctttcttttttgaacaatgaagtcttccttcagtgaagctcagcatctgctgtgagtttccagaggacattgtaagcaaagatccaatcccagtggttcttccagttgtgaaatgggaatcatgttctctgtgtgccctacccaatctcttgcccaagtgagagaagacaaatatagcagtgccttgagtttttcagagcacaattaaagccaaggctcagctaggcatggtggctcacgcctgtaatcccagcactttgggaggccgaggagggtggatcacctgaggtcagtagttcaagaccagcctggccaacatggtgaaaccccatctctactaaaagtacaaaaattagccgggcgtggtggtatgctcctgttatctcaggtactcgggaggctgaggcaggagaatcgtttgaacctgggaggtggagtttgcagtgagccgagatcataccactgcactccagcctgggtaatggagtgagactccatctcaaaacaaagcaaaacaaaacaaaaacaaacccaaagctcattattattattcctaagtgctggattcaatactcagttaaatatttatcaaaaaagttcacctgattcctctttttacctcctcattaatttttcccctcccctccaacctttgcatgttgtaggtctgggcaggacttctcccatgagagatagattctcctcaaagttgcaaccaagccccatatggctttgaacaactttttgtactcacccaaatccaattgaattcctcattgcttcacaaatgaaatgtcaatctacctttaaatgactgtgaacttttaaactcttaagctgtatcttgttaatatttgagctctactattgatcttatttaaacagtttatgaaccttttaatctcatatttgataaacttgaacctctcatatcctcctttaacatattagaatttttggaataaatattactaaacaaaattctgatatgatcccctggggtaggccaaaccactgtaattgataaaaggaatttttattattttaaatatttctaagatgaattctcagcaaggtgttgtcttgtggcatgtcacttttcaagtgtctgaggacattgctcactttgtaattctcacctactttgtgatgcatctttgtagagtgagtcggacctttcacgattcatgcgtttagcagtcagaatgtgaaagaacatttgtaaatgctaaactcaggtttcattccttctcttttgaagaatgtctgctcacctttcaagagtcatggcaggttatttcatgggcaagagagctccacctgtgaacagactccattcatacatggggattgagcatgcaacagggattgctgatcgtttgtaactacagcttctttctttctttttttttttttttcttttttgagatggagtctcgctctgtcgcccaggctggactgcagtggcgcaatctcggctcactgcaagctccgcctcccaggttcctgccattctcctgcctcaacctcccaagtagctgggactacaggggcccaccaccacgactggctaattttttgtatttttagtagagacggggtttcaccgtgttagccaggatggtctcgatctcctgaccttgtgatccgcccacctaggcctcccaaagtgctgggattacaggcgtgagccaccgcgcctggctacagcttctttcttatatttttgttccattattggaaggcaacttcaatgaacaaacatcttccaaaacttttgaatttttcttctgcttgctaaatactattttgtaaagtttcaattactagttcgaatccacacctcaataaatagatatgtattagagaaggaatggaaaaatatttactcattaagaataccaacacatgaaagtgatttcagagtatggagtcttgagtcaaaaacaaaggacccttcccggaagcttccttttttgcttcagtttttgaatttgactgaaggaaggtggaaatgatcactcgagcccctaatgaattctccttagtaaaatactggcgaggaagaatcaatcccagcaacaggatgatctgggaccagtcttcagatgttaattcccacttggccctactcttctcctttagaacgtttttcttgcaaaatataatttaatgcatttcagattccccttcctacctaaatagggccatagaataataattatctttcttatgggtcttggtatctaaattagtagcaaggacttatgaggtggtttactgcacttctttgcaccaaaaataataatttttaaaaagaccacattgtatctgataaagagctctatagttgtgtgaaaaacacaattagagacatctatcagtcagaaaatgtttcataggccactgaggtattaattagtacactggagtaattgtttggtagttggtaggtgccactggttacattgttgttaacctaataggccagaaacaattcttttcttttcttttttcttttttttttgagacaaaatcttgctctgtcgcccaggctggagtgcagtggcatgacgtctgctcactgcaagctccgcctcccgggttcacgccattctcctgcctcagcctcccaagtagctgggactacaggcacccaccaccacgcccggctaattttttgtatttttagtacagacggggtttcaccgtgttagccaggatggtctcgatctcctgacctcgtgatctgcccacctcggcctcccaaagtgctgggattacaggcgtgagccaccgcgcccggccccagaaacgattcttgttcatttcttttctgagatgtctgtatctgatgttcacatataacaccaaaccacatggtttttgtttgtttgtttttcagagtgtcaatccatatctacaaggacagagactggataatgttgttgcaaagaagtctgtcccccatttttcagatgaggataaggatccagagtaaagagaagatgctagacgaaaacccacattacctgttaggcctcagcatggcttatgtgcacgtgtaaatggagtccctgtgaatgacagcatgtttcttacatagataattatggatacaaagcagctgtatgtagatagtgtattgtcttcacaccgatgattctgctttttgctaaattagaataagagcttttttgtttcttgggtttttaaaatgtgaatctgcaatgatcataaaaattaaaatgtgaatgtcaacaataaaaagcaagactatgaaaggctcagatttcttgcagtttaaaatggtgtctgaggttgtactattttggccaagtctgtagaaagctgtcatttgattttgattatgtagttcatccagcccttgggcattgttatacaccagtaaagaaggctgtactcaagaggaggagctgacacatttcacttggctgcgtcttaataaacatgaatgcaagcattggcatatggagttttctttttaaagcattataaagaacaatttctttgtttaatagaacaacctgatctacatatatgatagtatatgatccaaacaataatgctgtgaacttaatgggtctggtattatccccattttacagatggtagaactgagatgcattcaacacactgagatacgttcaacacaccattgggaatcatcagcaaaatccagcatgaagagtctctacaggataagtagcctagatttttccaacaaataaatgataggagggaaaaatggtggggtactatcatagattttaaaaggcttaagagacatacgagccaaatataatgtgtgtgggtcttatttgcatcctgactcaaagaaaagcattgatcagacagtcagggaagtttgagtagtaactgaatattttggtatgattcaagtgttacacagtattatattatggctatttttttaaaagagcccttatatcttagggataaatattgaattatttacagatgatatgatgtcttggatttctttaaaataatccagtggtagtgatgaggtggagggccaggagggaatggggatatagataatcaagactggccatacactgataactgttgaagctgggtcaagggtacttgggagttcattgtacttcttatatctttttttttgttgcttttttttttgtttttgagacagagtcttgatgtatcacccaggctggagtgcactggtgtgatctcagctcaccgcaacctccacctcctgggttcaagcgattctcctgcctcagcctccggaatagctgggattacaggtatccaccaccacaccctctaattttcgtatttttagtagcgacttggtgtcatcatgttggccaggctgctctcaaaactcctgacctcaagtgatccgcccaccccggcctcccaaagtgctgggattacaggcatgagccctcgcatctggcttgcacttcttatttctatgtttgtatgtatttgaaaaattcaacaatagaaccacagttaatggttaaaaagtaagagtagatcatggtaagaactggcctggagtccaggtgtggtgcctcatgcctgtaatcccagcactttgggaggccaaggcaggcggatcacctgaggtcgagagttcgagaccagcctgaccaacatggagaaaccctgtctctgctaaaaatacaaaattagctgggtgtggtggcgcatgcctgtaatcccagctacttcgaaggctgaggaaggagaattgcttgaacccaggaggcagaggttgcagtgagctgagatggcaccactgcactgcagcctaagtgacaagagtgagactccgtctcaaaaaaaaaaaaaacaacaaaaaactggcctggaaatagcaatgttggacaaggtagaataaggctacataaggctgtggacaatgtgaggaagccaaaaaggaaggtgaatgaagagttgtcccaaggt

SEQ ID NO: 536 - DNA, 128270 bp, Homo sapiens
  source 1..128270: mol_type = genomic DNA
actgtttttccatttgcagcctaaatttaaatataggatacagccaccaaagtactctcctggtcagatacaggagtcacgatagtgaaatccaggacttctgacatgtagtcctcatttccatccatttaaggactccatatcgctaacttcacaagtgcttcatgagaccatttccatagcacttccccttaggacacctcaattgacttgcagatgttctattgctaattctcttaacagttgtatttgagagtggtgggtccattggaaagatatctgacttgcagaaagtgaaacctcacccagtcatctgccttctctcttacaggccatgggacatataccctgtacttggctccacaagaaatgactgatgtcaccaaaacatgagcaaatcttagaaccctaatttcccaatagttgttgtcctgtcccaccaaaaccaaaagttgggcatggtggctcacacctgtaatcttagagtgtgggaaggccaaggcaagagtatcacttgaggccaggagtttgagaccagcctgggcaaaataatgagacccccatttctacaaataagtaaattaattaaaagcccaagcctgctatcacatttctccaggggtcagagctggagtttacctcctgctcaagacactggctgctgggtcagaggagattcggacacatcacctggtttaaccccaggactctatgtgaccttcatcccagccctgactcagcagcctgccctgtgactaacttcctgtgactgggctttcagatgttgatgttgatgatgtccctgccaggataaccggtccagattggccagctgtgagaataattcaagtgggtttcaggtaaatcactttctgatcaccaatctctttctctttgataaaatatcctgtgtctcttggggccaggttggtggcactaactcactggatgcttatgtttatgaggcttttaggggtagttagatgaaccttgccagttctcctgtcctggctgccctctcttgtttcagattttgtgatggactggaacacttagacccagaatctgacaccaaagcctgatgaaacatggggcagtgcctggccaccgaacctgcccccagagcaggtggctagaggcaggaaataaagaggatgctggtaggtgttgcaccttaggcaacagagtgtgctctctctgcctaaagccacctgccctatacccatcccagatgggggcttggtcagtggggcctcctccacctcccctccccagactctaccatctttactggggactttggccccagtaaattcttgcaacatatgaaatgcccagtggaaatgcaaaataatcacgtcatctttcacacatttatggtatgttggcaatgtttctaatagccactaagggacaagagtttatctttctatcttacatctcataaatctcttcctttttttcatccctagtgtaaattgtgcttagaccaataacacatttaaaattatagagcttttcatcactacggagatgctcttgcctatgataggaacgatggctacatctgaagctgagcaaatttatcttttctcttcgtctgcatcagggtgacctctggaaggtaagtgaaagattttcacttagctgggcacaggctttgttcaaggcatctgcttgtaagagccagtatttaagggggaggtttgggcctaggggagagcctggcaatctgtgtctctgttcttcttcagagtttctttttcagactccaaactgagggcgagtcatctgagctctctcacggcggtgaggagcctgggttgtgtaaatataggtcagttatttaacctgtctctgcctcagtcttctttggggataataatagctctcataagttcattgtgaagattgaaagcatagaatgtgtgaagagctcagcacagtgcctagtgcataataagcacttttaagtgccagccagcatcatgatcatgactgtttctatcctcccgtttccatgtggcagccttttgctttgccaggtccctagaactgctggaggaatccatacaccagagatgtcgctgcacttctggctacagtgccatgactcttcatatcagtctctgcctcttgggcaaggaacaagcacaggcggaattggtgacaagctggcagaaactccaatcccaggcatgagtggggtcctcagacagttcttgcctcttctttccactgctgactgctgttcctcacataggtcgtccggctgctcccactctcagcctgccacacctgcacagcatagtggactgttgccagagcagtctgcggaggtgctctttccaccctccgccaagcacttgagctccattgagtctttctgcccacacagctctagagggcccagacccagggtggaaataacccccattttctggctgtgatgagatgtttattaggtagttatttctccccagattttacccatatcaaattggagaattcatcttgtccccttttccagaagtacaacctcatctaccattttctgcagtgttccttggttctccttgaggccagcttctgtttccaaatgtataggagacatctctattcctatctccgtcaaacactggatttttttgattaagggttaccctaagacattttctaccctcctccagataagacacactccatgtaattaggccgtccttaaccaaagcacttgcccttctctctgggatgggaggtgaatgccatgccaatctctctctcctctgacctcaccacttaaagttccttatttaccagagattcattcattgtagaagctgaagaagcgctttagattgtgtctgagttggagcacagtgaatcttcctccagggcttcagggtctgctttctcttctctttctgagttgttgagtaagccccaagaatagcttgcattttcttcccttaggaaccaaatccagtgtagaaactatagttccattttttgaaatgatggcgtatcatatgtgctgacatttcttccttatcatggttctcccaccatgtatctatctatcaattgatctatcatccatgaatggcttcttgctggctacacacttacctctgagccagagtattttcactaaaaagcagatgtgccaagatatgacttaccgctgaacaatggcctggttttcaccagattctgtttgctctcaacaagtggaattggacgtctctttcatagcagcatttaatacagaaatgcctagaaatgcacagacagggttattactgaagctaatataagtcaagggaaaaatgcatgggcaaggctcagaaacagaggaaacacctttgtctacaaaaggttggatatggctaagaggtgatcaatacttacaagatgaaaaaggatgcccatctttgattcctctctcttttgcaaccccatgtccagttggtcactgagttttgttgtcctttcttcacttcataatatctcttgcatttctttcttgcttttcgttcctactgtgctccaaccctagttagactctttttatctcatgtgtggtccattgcaatagctttctcattgtctacctactgcacatattttctcttcaaaaatcgccctacagttgccattggattaatcttttaaaagtactacttttcggctgggcatggtggcttgcacctgtaatctcagtgctttgggagtgcagtcaaggcagaagttcgagaccatctataaaaagaaaaaaaagttatccaggcatggtagtgtagtcccagttactcaggaggctgaggtgggaggatggcttgagcctgggagttccaggctgcaatgagctatgagcacaccactgcattccagcctgggtgacagagtgagaccatgtctccaaaaattaactagctaaataaataatgttttctcaaaacttacttacctgtaatcctccaatttccctctaagaagatgcccaaagttctcatcgtatagcattagaaccctccatgaagcagctcttcaatttactcatctatttcccgccattcttgattaaacctctactcgtgtcaaatgggtttacctctcctcatctaaaatttgttcatgccattccagttcctggatacgcccttccttttcctttctgcctttccaaatcctcccccattccttgaggttgggtcaaatctcactcccagcttgaaatgatcactctccacagaataccctgagacattatttttatataattaattttgagcactcagcaaacactgtcccatgacattttccctagtgttttgagttgctgcctaactttcatatgcatacctctcatcatatgtcctgtgtggtgaactcctcacagatctcacagatggttgattcatattctaacttccttccaaagccttttgcatgagccttgcactaagaaggtattcaataatattggacttaattaacagaagagaaagcaactgaaaaggaagacaaactagcgaagccattttcatcaccagcaaagaaatgacagttccagagtttcgttcctgtgcatgttgaagttgcacgtgttgaaatgatggcgagtgtgtttttcataacattacatatctggaaagaatcttgtgaggtcatcttgaccagtttcctggctctgagtcatcagagactaaaagatctatcatatgctcgaagaacctggagagaaaattcctcaggtattttgggcaattgagtctcagggctgtatcagctcttcccataacagttctctcacttgtcactctagaccaatgtcctgaaattttagtgtactcaaatttgctgaacttctacagtgtatgtttaaaatgtaggcttccaggcccactccaaagaataacattcactcattctggagtggggacacatgaatctgaaacatacatattctatttatgtgtaatatatcccaggtgattctgatgcaggtggtctgtaaaacacactgtgagagagaaaagaaattgttctgatttatttttttttaattttagtttaagcatattcattccaggaccatttgccatgaacattaaaaaacagctgattaatagtttttcttaataattgcatttccttacatacatatttttagcctcatgtatattaagagctctctatgttaagttgaactcgatgttcaacacattcattgagcacctatgtgccaggcatcatagctatcaagatgaatgagttaggtactaaggtagattgatcctcattcttaggaagctcatagtttagtgggaaagtgaaaaactgtgataatggtggtgatgacctattacctttcatccaaagtttgtagacattatatatgtttgtggcagtccagcaggagcagagacttggggtttgttgtccgtggcactaggcagaagagtatgtaacatgcccccttgctctggctcctgactctgtgcctttagggctaatgaaaagaaaatgccatcaccccaccactccaacagctctccaagagcagtgagcattggtcagtcagtcaactatgtcttactgaacatttggaatgaccagcactctgtaaggcatttgcagaggatgttgctcccttcccataccccagactttgccacaatagtgctccatgccttccccattcatttgggtccctttgatttccctgccaccaacagaaaaggctgagtgccctctgcattcatgaaatatttagtgagtactccaatgtgcaaggcacttgctaaatgatgtgatgaatacaaaaatgaatccaacacagattctactcttaaggagcttacagtctagtgctgagatgcatcatgtaccagttacaaagtagaatataagcaaatataccatggggttgcttccagccaggaatgggaaagggggctgaaggtacagagggataaggagtgaggagtgttgtgcaaaggggaggtgagtttgggctggaggtgttgaaggatatccggtgaagatgaccagcaaggagttagagaatgtgtgaccagggcttggaaggagggaaaggcaagggacactggtgtcatatgaagcaggactggattctattgtcaaaagagtgcagcaggccagagaaggagaattaaaacacaagagaggtgtctcagatatgccatcttttcttattagacctcaatttaatcactgagaagttgaatttagtgtttgaaagatgaattaaaacattccatttcctgatgtaactcagaaaatacattttcattgtttccctgccttttcttgggtgatgggctttgaatatttccatgtagtttgaccagggtctctattagacctatgaaagaaaggctttttgtactagactagtgcctccgtgtttgttttattcaggaaaaaaatggaaggaactacagagggaagaaaggaaaaaggagaaagagaacaaggtctctgtttatgggcacctttgtttgctgaagattgaggagaaacattgtggattctgattgtgacttgcttgaggtgaaatgtgttctttataaggccgggcttgctctcagggctttgaaggactccatgttgaagacctcctatctttggcacattggattaaaactataatctccaaaacactgccctacagtccttttgtgctgtgctttctctctttgcttgtctttctatatcttctcctgtttctgctatagagtgttgggctcaatgatagtggctccttgaataggagcagaggaaagcgaggtgggggaagaaatagctatgagagaacgtattagtcggttctcacactgctataaagaactacctgagactggctaatttataaagaaaagaggtttaattgacacacagttccacatgctgtacaggaggcttggctggggaggcctcaggaaacttacaattatggcggaggggcgaaggggaagcaagaacctcttacatggcagcaggagagagagagagagagagagtgaagggggaggtgcttcagaatttcaaacaaccagatcttttgagacttctatcaggaaacagccccaggtagatagtgctaagccattagaaaccaccccatgatccaatcacctcctgccaggccccccctccaaccctgaggatcacaactcgagatgagatttgggtggggacacagagtcaaaccatatcagagaataacaccaaagtgttgatttgaaaattttcttagagtaactgtttaggcacaggcaaattaaaatcctgtgcataatcctgtttgggtgcatttgcatctctttaaactatctcatacagctggatgtcatccttggagggaagtctagtggagctcatggccagagtacctagcaaattttcaaagaccttgtgacttatgtttacttgcttggcaatgatgttcctgtgagaagcatgagaccttgtcttccacagagcaatttaggaccatcagtgttacagagactccaaccaacttgcacaggtaagccaactagaatttgctgatgtacagctaaaagaagggtgagcatgaggccggggactctgcattccacatctgtgctcagagactctccctgagccacgtgcagagcagctgtgggtgagaggtgagctgctcgctgctgaaacaccccatttggtgaagcaggcctttgtttgagatgacaccgggagtgaaagcaggttatcatcactatacccagtggtctgacagagcaaatggaagaactcggtgaggtgaggagaggtgagagaggtgaggaaaagattagcgaggctcaaatgggataattggaaaagcaggggcaggcagtaaattatgccccttttacttggcttagttatcatatcaccccgaatgggtgaaataggtcagcaacccatgggtgaaaagcaaactcaggaagggtcacagaggtgagctaagaaccgagctccgaggacactttcaggagcctgtggaaaccgtgttgctggattttcatgcttagaaagagaaacaggacagaataagtcaatagagtcttctgggattgtctggaggtctttttcatcttgtcagaacctagacctatcagtaggaaacaggttgaaaagtctcacaaatgaagaggcaaataaagcaagggagtggtaattgttttgttttttaagagacagggtcgcttgctgttgcctaggctggagtgcagtggtacaatcactgttcacttcagccttgaactcctgggctcaggcaaatctcctgcctcagcctcctgagtagctggggctataggcatgcaccaccacgcccagctaattttaaaaacatgttttttagagatgggggtctcaccatgttgctccggctggtcttgaacttccagctccagtgatcatcccttctcagcctcctgagttgctggaattataggtgcctgccaccatgactggaaggaagtggtggttaatgtgggttctggactgcttacttttgcctcccaccccaacttgcaaccttgttctgtgaccttaggaagttactttacctctttgtgccttggtttccttatgtgtgacagggaaataataattgtacctagaccttcatacgtataaagatcttagttcctagcactcttaagttcctagcagttagaatacattcaaaaagactagctgagaaacacttgagagaatggtttcgatgcccttgaggtcattttggacattggcagggacttcttttggtggttacaaggatagggatactactatcatttagtgggtggaggccaaccaaaacaattcatcctgtatcccacatgacttttgagtgttctcatctgggatgtacacatcccgataggtgaaaaacctaatattattggaacttagaatctaactcagttttaaaaaatttcatgagttctttttgcattgttttcacatacactgaattttgaatgatcataccaatcaagaagattatgctctgcttcgtttagagtgctgtcaggagtggttccccatttcagaaagtcacctcactgatgacaaaaacaatgacctgtcggagctgcatttgtaactattatgtttctaaggcctctacgcatcatgaggcctcatgacttgattgtgacttctagcgtagctatgcctgggcgtgaatatatatatattgaaatgcacatgattttattataaataatgttgtgtctcttttatatcagttagggcattgtgttgatttcttcttgaaatgtatgaggatgagttatgcatattaattttattgaggatattaaaaggccattataaaacagttgttttaaaaaggaggtttagctgtgataggtttttggagctaagctcagcataatcataatggttgtagttcccaaaagtcggtccctgagtcaaggaaatcagaacccaaagaaagggtatttcacttgctctcagtttgcctgttctcttttagccgggtatttaaatgcttatgtggtggtcagagcatttcggtatattgcatgtatcttctgttaaaagaaaaacttcagtggcactaaaattagaagagttttattgaacaatgaacaatttgcaaatcgggcagcctcctgagccacaataggctctgagacttcagcgcagccacgtggtggaagacttatggacagaaaagggaaactgacttacagaaaatggaagtgaggtccagaaacagctggattggttatagctcagcatttgccttatttgaacatggtttaaacatctggccacatttgattgatcaaaatttggtgattggcacaagagtagactacagtttgtttacttccatgtaggctatagttcacgatgtacagagcaacctttagctttaggttaaacttgatttaacactaccctcaataatcttgaagtctagtttctgattaagatgtggccatctgtcccatctctgtagcacacttaacttcaagaggagaccatcttttgtgcatgtgaactcttctctctcccgctgtgggagctagatcacaccagaaaagcctcttttccagggattggtggaaagactaaggcagccagggctggaggacctactttggcagaggtgccctctgctctgtccagggctgtctccccagctgaaccatggtctcaagggctcctgctctctgctgggtaggcctggtacaattaattctgaggcccaatctttgatttgattgctgttaagtcctgttgtttagggagggagagcgtctatttactccctgacatggccaaagatggaaacggagaagttgcagaaaaactttgtgggtaataatgtcatacctagaagatgattgtgttgcctgatagccatggggaagatggcaagtagagacagctttcttgggggtgtgagtcagcttgggctgctgtaacaaaaatatcatagacttggtggcttataaacaacagaaatttatttcttacagacctggaggctggaagtagcagatcagggtgctagtatggtcaggttctggtgaaggcccttttctgtgttggtaactaaaaagagggctaagagctctcaggagtcttcgttttataagggcaccccagagagtgaggtgctacaccttcattacctaattatctcccaaaggctccatttcctaatgccatcacattggggattaggaagaacctcaacattaaatttgagagggcacaatcagtctctaacatggggatggggcctgagttcagtttccttctattaatatattagaatatattagtggtaaaggtgttagagtctagactgacaaaatcaagacaaaataaagagccattaagtctttcaaaatttaatctataattacgctgtattcagaaatgtgctggttcccaaagattaagttttcctgtgtctaggtactaaaagaaaataaaaagggaggaagggagaaagagaaaaagtaagggagagaggaaatctttgagaaaaactattaattagtattgaggagatctataaagtctcttcctggggctcgttgtattttcaaagttgtccacagcaatctctctcaccctacaagctcttctgcaaagaggtggagtctccctcccttccctcttgaattgggcctatcatgagagcaaaacaccatcttctgctggaaaagagaaaaggatagaatatttctgtggtgagaaagaaggttatttgataccaaacccagaccacacccactagagctggagttcagcttacagaaatggatctaagatcaagtcaaatcggtaaagacactggtgagtcagcgggaaccacagtgagctaaaggtagcactgggtgggaggccaaaggagcgggttgactgatgctggagatttgatgggagcggagccttcatgagaaaggctggtatcccacaaggttgcatcagtgttgtcagcatagtcgtcagtggcttgagacctttgaacgtgagctaggggtggatgtgtgcaggggcctggagagactgcggagatctgagtgagaccagctttgcggggttactggcagtgcacattctggctctgttttcctgggatctgtttcttgcccttcctctaccctgttctaaatcaaagggttctgacccttgtaggttgcttttctaagatcggaggatgataggaggcgctgacaggctggatggtggaggtagagagggagaaacgaggccttctcccctccttcccagccgcgcacctctcccactccatttgttgccagacaggtccactaagggtccagcctccacccagtgacgtggagactccgcgaggcaccctgagctccgggaaccccctcctccctttcctctgccccgaggtggtgtcagcttcctgtctttgcagtctggattcctcaccccaccctggctggcctctcggctcctccatcccttgtgtaattgatccctgcctcaaagtcctgtctggaattccctggtggtttctgtttcctggttagatcccgaccgatacactggcctccggagctggtcagctctgattcctagaagagagctgctaaggaccggcctggggacgccttgctgaaagaggtttgtagggaaaccaaccgacttcaggacagtccagtatgtggcttacttgaccccattctctccagaacgacataagctgttatcttaagggagggactttaatggaggaattgatttgggatggggtgaaggattcactaaaagagaggcatcagtggcaccagagagcagagaaagctcatgtcctctcagtttagaaataaccaagtgttctggtgggggcttatgcatcactgaattactgtcgcattcttgggccccatataacgtttgtatcttgtgtctggttcaaatagaacagagaataagggagtgagtgcctctaatttaatattcttatgtttccatcacgtcaaattcccactaggacaaatgtatacaaatgaatcattataattttttcccttttaccctagctgagccacttgggcctctgctaagaaatgatgataaaagtgatgaaaacaaagcataacattataatgtcatttaaaaaatgaaagatttccaggagatcctttgttgtgctggaagagcacgagctgcatgtttaaatgactttttgttttcccttttggataatcacagagagtaatgtaaccaaaataatcttggactgctgctgaggtcatcatttagttcctgctgacatgttgtgctggtcagaaagcaggggatctcaaagggagtacagccctggagacatgagagaaggcgtcattcagactgctggtgcttccctcagagacaacaggggcatggggtttgaatctggctgttcattctcccatcccaacactggagacacagatgaggagcacacctgtatcccaggcattgtagattacagcgggagagagaaatgccaactgggactgtgtccttgggggatgcgatttttcatactgtataatgaacgtgcaatagggaagagcatttcattgtgggttttactgcactaggcgattctgacgggtatatggatactcattccaacttacagtcataagatgaagacggtcatggggaagctgcctggcttccaatgaaatattggggaagaggattcaatatcaaaagttcagaacggagaatagcagagtacaattataaagccctaggtcatttgcttacttgttttattcccttcactagacacagggctgcaaccacacattatgggatagtttagaaatgtggcccacaaattctttgacactcctcctatgaaaatgagggattcatatctcctgctcttgaatctggggagagagtgggggaagcttgtgagtgttttgacgaccaatagtgtacagtgaaagtgacaaaatgggatttctggggctggatcataaaaggccatgtagctttcatcttacaaactgaaacactctttcgtagagccctaagctgccgtgtaaggcatctgactacgctgaagccactacattggaaaggtcacatggaggagctccagctgacagtctcggaggagctcagcttcaagccatccctgcaaggtatcagccatataaatgaatcagcccagctgccagtcaagtatctttgcatggcttccatcagtgcctcatgaaacggaagattgactagccaagacttgcccaaattcctgacccacaaaatcatgagatataataaaatggttgttattttaagccactaagcattggggtgatttgttatgcagcaatggctaacgagaacatattcctaactagacaagttcctagtctattcacaaaggtaccttttttctttttttagagacagggtcttgctctgtcacccaggctggagtgcagtggcgccatcataactcactgtaaccttaatctcctgggctcaagcgagtctcccacctcagcctcccaagtagctaggactacaggtgcataaccacaacacctggctaatttttaaaattttcgtagagacagatcttgctagcttgcccaggctggtctccaactcctggcctcaactgatcctcctgtcttggtctcccaaagttctgggattacaggcatgaaccaccatgcccagactagtcacaaacgtatcttaataggtagagttcactatttagtaagctttagtgtcaaatagccttcagcatcttttattgagtgcctgctgcaagcccctttgatatgggggatacaaggtataaggtttagtttctgacctaaaggaactgataaaataataattatgggataccattcactgaagtattactatgattaggctaatgattctcagagtatggtacctaaacaatacatcagcatcaccttggaatttgttagggttatttatttttaatttatgattattatttttttagagacagggtcttgctttatcacccaggctagaatgcagtgacacaatcatagctcactgcagcctcaaccttccaggctcaagggatcctcccaccttaccctccctagtagctgggactgcaggcacgtgccaccatgcctggctaatttttaaatttttgttttctagagatggtctcactatgttgtccaggctggtactgggattggatagtttgaataattttagcaggctctgaggcatagggtctacccctcattgcctgctacctggccctggcaatgactaggatacaggactagtgacccaaatgtgagagcccagagaaaggaggtaatgggtgggtatgggctttagattggttggtttgcatagaaaggcacattcacagatcagttggttactatctctaggagttggctagttttgggagcagcaatctctccagggtcagcaaggtcccacacatcaaagaattagaataaaaagacctgcttgatacagatagatacaattaccctatatttcagatggcaaagttgaaatcctgagaagtaagtcatatcttcaccaaggggaggacctagatttaaacctgagtctgctggaccccccaaaccatgctcttaccaatgtgctattctgttcttcatcgagctaattaagcatacatgtgggcatctataattgtataaaaagataatttacagagcaaatgaggatgctgagtaatttctatagaaaataattgcatgaagcaatgagaaggaggagggattgcttgtagtggtcacagaagacttgtggaaaagggtcattcagactgctgctgcccccactcagagacgatggatgatgggcattgtgtttgctgggtgggtcttgaaagttggatagaatgggtctgggcaaaactggggagaaagaacattctgaaaagatgggaaatgatgtgatcacaaggctcaaaggcagtagtgtgcaaagtctgatgaaaacaccaagtgttaataggctgccttggttatttgaaagtagattaggaggagacagaagttggatgcagctggatgccacctattttaatgagctaaatgcatcagaagcagtgcatggatgtgcaaaaggtttggcactgtggtctaaatatcaagaaagtatctccatctaaaagtagtgccataatctaggtgcctgagctgggtaaaatgtagagtaagaatctagctgggaatttccagcttggcatcttgtgagataatatgttaggctgggaatctgtgaccaacagggagcacacagacaatggaagatgtttccatgtggactaaaaagagcatcaaagcttttgggaagtgaaactgacagccaggctttcgtttagatgcttctgagcactcacattgtcccaggcactgtgctaggtgatagggagttatacatcattagtcatgctaatcaaacagggtctctgccactgaggtactaaaaagtagtgagctcacagtctttgcacactagagagagcagaggaggcgtctgtgcagcccagccttggaaaggtggaatgaacgggcgcctgtctgtgtggtgaaattccaggaggcacccacagagattatggcagcgcaaggtcgaccctcctatggcttagcttgcaagcctcccacttctgtggcgggagtcacactctctatcatcactttttttttttttttttgagacagggtcttgctctgtcacccaggctgaagtacagtggtgtgatcatggctcactgcaggcttgacctcctgggcttctcccacctcagcccccatgagtaactgggactacaggtgctcaccaccatgcccacctacctttaatttttttttttttttatagaccaggtcttactatgttgcctagggtggtcccaaactcttacgctcaagggattctcccaatctggcctttcaaattgttgggattacaggcgttagccactgcgcccagcctgtgtcatcacttttatactttagtagggtccagatcaccaagggagcttaataatgcacattactgggccctacccctcaccaaagatgcaggttccctgaatgataaaagaacaccaccttacatcctcgataacacctttaatacctttgttatcagttaataacagagcagccagcattgataagaatctaactagaatgtaagcttcagaagggcagaggtatttgtctattttgttcactggtatatccacagcgcctggccatattaggcacttagtagctctttgttgaatgaagcatattgaaacatagatgtggagggtgcaggggaggggaagaaattaagtcaaaaagatgtgtcaacaagaagaaagggatacttttaatacgggaagtggaaagatattaagtgcaaatttggcttttccaaaggtctgctatatttgggtggggaaggaaggcggggaggggaaggctccggtcttcactctgctgaactaaaattataagttgaatgatgcctcctaaaccattggtctaagaaatgttctgattatggaaaaatatccattcagtgcctttcaaattctccgaaggcccctcttttcttactgtttctaaccttccgccatgttcagagaaaacaaacacccagctcttctgagctacagaaattctctgacgggcccacgtgctcatttttatcgacgttccccaggtcactgttaattcaggccccagcaacagcacaggaatgccctggcatccccacagctccttcctgaggagatgagcaggtcggctggaaaacacaatagaatacaaagggaaaagatcttggaaaagatgaaggagaaaaatcaggacccctcaccaagttaaacaaacatctggactgaagggctgtgtaatcaggttttataaaattattttcaataggaaatgatgttttactctatatctatgagacatttagttttcaacattcttttccctctaaattcatatccttagttctaattcatttctctgtttatacatcttctttggaaagatatttttttcttttacacatctttttttttctttctgatcatttctgtatttggcctaattttctccttttgctttggaccagcagtgtgtgggcctcaacaggtaggcaggaaagcagctggtctctgaaagaatcaagcagatcacaaaatgtctgtgaaatgaacatgtctgcctcaagcttcccactctgacggggctcagtgccgagctctgatttgctctggtgaaaaaaaaaaaatcccctaatttcactgtcaaggttttgagaggcattctcatggttttaaagagattattgcataatttgttcatgtttaaagaattatattgttaaataaatttagctctccagattctaaatgacaaaaacaagagaagttacatcatttgaattatgaagtgataatgtcttccaattctgccccaatcaaaagtgtaacagtttaaagcttataataatcatgttcaaacatattcagattataattacttttcttctgataatgatagcccgtctgattggatgattacctatttgactttgataagtctcagaggtcaaaaaagggataattgcagacatctgttttctatggaaaatataatctcagaaaatagtgtttaaagtgacatctgcaaatatgtgttttagaaagaaactcgttgtacatttaaaatcatagggaaaagaagcaattcctaagctactatgtatcaccctgtctttgtaaatagatgagcgagtttaacttactagtattcatgtatgcatgagtaattacaagcaggcatgattatattttgtacaggtagaattagaaatagacatagattatgagaaaggaatttgaaagtgtctacaatatggaatgatatggaagactttcgctttacttttgtttgttttagttcaatctaggcatatatagctgtaaccattttctaggtggttttttatttggaaattggaggtggaaggtcttatttctttgatttctccttggagatgaccttctccagttatgagggggctcctgatgaaggcaaaaggttcactcatggctgccatgcttctctatgtagaagaggtgccagtttctctctcggcaggtgcatcagcttcccaacctcttagggagatgccaagaacctctccctcccttcagccagcagctgtgttctgccgcaaaaagggagaactgtatttaatattcccttccatgcatgataaaacttccttggctttaactaattaactcagaatcttctctaattcatgcaagacctgggttatcactttttctagattcagcttcctaaaatacaactttcaccctagcacttcccttctcaaaagccttcaaccactcctcggtgtctaaggaaggaattccaagcttctcggcaattcaggatctttcataatttgaccttagcctattttttcttctctttttcttctacataaagctttccttttttgttaaatccatctaatgctaaagggtgttaatctttcttgcttctaatctagatctttggtgatgctggtacattcgcatggaattttatcttccccatctctgctaattaatgttttgttggtggtggttggttggtttttgcacctcagattcacagaactggataaaacgtaatcgtaggttcataacaaactagtatgattggtccatgcaaggcttcttttatatttatccatacatattacatttttactccagtctatcttaaatcctctcatttcaataaggtctttccctatatacacagatataatgaccctgttaagagggctctttctgtctctgaactattacaatgtttattatgcagaatgtagaccaccacctgcatgaaacatatcacatgctgcctggtactatcattgtctttgcacatagctgcagccagctagtcacatcctgctatgctgtgtgtgcctgagactttgccatagatgtatgatagcctttaccaagttgtattgtattacatattatctgtaacatccgtcttccccctaaatcagtaagctccttgtggccagatttggtctttcatttatgtttgcatcctaagtgccaaccacagtgcctgacaagtaacgtttagtaagcagttgttgcatattttgaaaaattagattattaacttctaggaagcaatcagggagtcacagaatttcagacaagggatggagctcatgagttttataccctttttatctttcacagtgcctagcagagtactgagcagacataagtccttaataaatacgtattgagggattgatgcttaaattccttcagaaaattaatgaactgcatattagggagggtacccaacttatctcagtttcccctgaactcgctcaggtttgtttttttttttttttttttttgagagggagtcttgctctgtctcccaggttagagtgcagtgctatgatctcttctcactgcaacctatgcctcccaggttcagacgattcttctgcctcagcctcccgagtgcttgggactacaggtgtgtgccactatgcccggctaatttttgtatttttgttgttgttgttgttgttgagacggagtctcacgatgttgcccaggctgtagtgcagtggcactattcggctcactgcaagctccgcctcctgggttcacgccattctcctgcctcagcctcctgagtagctgggactacaggtgcccgccaccacgcccgtctaaatttttgtatttttagtagagatggggtttcaccgtgttagccaggatggtcttaatctcctgtcctcgtgatccgcccacctcagcctcacaaagtgctgggattacaggcgtgagctaccgcacccggcctaatttttgtattttttagtagagacagggtttcaccatgttggccaggctggtctgaaactcctgacctcaagtgatccgcttgccttggcctcccaaagtgctgggattacaggtgtgagccactgtgcctggccaaactctcacaggtttttgtttgtttgtttgttttgtttgtttgagacagagtctcactctgtcgcttaggctggagtgctgtggcacaaactcggctcactgcctcgggggttcaagcaattctctctgcgtcagcctcctaactagctgggattacaggtgtgcgccaccacacccagctaattttttgcatttttagtagagactgggtttcaccatcttggggaggctggtcttgaactcctgacctcaggtgatccacctgtctcagcctcccaaagtgctgggattacaggcgtgagccacctcggccagccactctcccagttttaaagcaaaaaaaaaaccatgtctgggagtccccttagtcccaggcaaactgggacagttggtcagcttagttagaagtctcacacacatatcaggagggggtatagctctgaggcagagtattggactgcagatcaagaagtctcatgcacataccaacaatgtaaatgctaataatattactctctctcctcatggaggtcttttaaggatcaatttgcaaacttaaactgaatttctgtgtatttgatagggaccaaaagaaagttcttgtgaattagtctgaattttaggctcttcagaatttaatttaaaaaaattatattgttattcccccttgtaaaaattagtaagagtttgaaatgcaactagatttcacttctcagagtgtgatttctcttttgtgagcttaaagagacagagcttaacaaagactcaagcctatgacctacaggccaagagggaataggccaagagggaatataactttcaggtagaggccacccacaactaggctgcagacccccctccccactgtatgagttggggggggcagggggtaggggagctgttgtgaatcaccaagtctcttttgtgtaaaaccagcctccttgggtcctctcagaaatcttttattaaaactctaagaattttcctattcttcgtgctattccattgttattccattccacatccattgttatggagggaatatttacttgctattgaaggaagtcttgtgggatgtatagtcaataatttcatcaaggagtaacttatctttctacttctggtggaaaagggagggaaaaagtttctcttaagtagcttataagcttttgaagaatatgtacaaagagatatttttagacaaagagagtattattttccaatttttagtaaaaaagcagcataaaaacaaacaaagtctgaaacaaaaaaaacaataggggcatgcccagagaatgtgatggccactgatttctgcattagtcacttaacaaatacacacacagaggatgcatgtttgtttctagggaaaggcccaaatgggaattatcctggatgtaacttataggattagagatttgttggctctttcactaccaaggagaggaagaagaagaaggtaaaacaaatgcaaaaataagaaaacaaaggtggcaaaacttctagcaaaagcaaatctttgccatagtggattctggaagcttgaaacatttgcagttcacacagtttatataattctatgtatatttgcttcttctgacttatctaggtgaactaagtatagttggctaaaggtgttgccttagtctgctcctgttgctataacaaaatactatagactggataatttataaacagcggaaatttatttctcacagttctagaggctgggaagtccaagatcaaggactaggactcaagatttggtgtctggtgtaggcttacactcctcttccaagatgatgccttcttgctgtgtcctctcacagtggaaaagtggaagagggaggcagctctctgaagcctttttttttttttgagatggagtcttgctctgttgcccaggctgaagtgcagtggcgcaatcttggctcactgcgagctcggcctcctgggttcacgccattctcctgcctcagcctcctgagtaactgggactatgggtgtctgccaccacgcctggctaattttttgtatttttagtagagatggggtttcactgtgttagccaggatggtctcgatctcctgaccttgttgtccacccgcctcagcctcccaaagtgctgggattacaggtgaagccttttttataagggcattcatccttcacaagggtggagccttcatgacttagtcacctcccagaggccctaccttctaatactatcactgtgttgattaggtttcaatgtatacattttggagggacacatatattcaaatcatagcaggtgagattcccttttatgccaggacattggcctccagctgacaactatctccactccctgccatacctccggcccaaatgatcataatgttttgcctaggcagttgcaatcactcccccgtattcactttgcccccccaaccccatctgttcttcttgatacaaacagaaccaatcatgtcgtcctcccctttcctctcattctccttccccagggatgaagtattctgaggtgaaagaccaagattcttaatatgctcctcaagatcctgtgtagtttggccctacttacctttccacctcatcttgcaccaatctctccctgttcctctgcacttcacccagcctcatctagttcctcacacttttcatgcagcttctcaccacagggcctttgcacaagctgttgttgccacctggagaatattctctctcattctccactgtgtttagttcttctattcctttagggtgcagttcaagcacatgagctcaggaaagcctttgcagagacccatccaggtcagatttctttatgacatattctcctaagtccatgtttgtttcatcaagagaactcatatggatatgtaatagtatactcattttttgtgattaagcaacctctgtcaccaactacaagggccatgaaagcagggactttgtttctgctttgtatttcatcctcagtgctcactgaagtgattggcacatggcagccactagtcaactgcttggaatttttttaaagaatttgtttcaaggactatccttggatactggacacgctaaataataagtactagattggaacataagaggaaaatttgagcttcgattcgattcttgtgactttctggaagatgtaacgtatttgccttggtttctatgtctataacctaagaataaaaaggcctgctgccaccagcctcatcccatgaactgtgctgttctcccgtgattcagtgcatttcacagtgtattagtttaaaccttaggtgctgtaacaaagagacctaaaaatgcagtgcttaaacaagacagaacttatatttttttctctctctcatttttctctctcccaggccagtattccagggtaggtgtattggctcagtggtgtcagcaacccagacttcttgtatcttcttgctctgccatcctcaatatgtggcttctctcaagggcccaagatggatgctctagctttcaacatagcaaatacattttagttattgtgaagggagaaaatggaagggaaaggttttttatttccctttaaggacgtgaactggaagttgcacatactacttccaatttcactcctttggcaagagctgaatcatatggctacagtgagttgcaaagtccattgtgtcgtgatttttttgtcagtttgttttgagacagggtctagctttgttgctcaggctggagtgcagtggcgtgacctcagctcactgcagcctcaaactcctgggttcaagtgatccccccacctcagcctcccgagtagctggattacaggcatgcgctagcatgccctgctaatttttgtatttgtatttttgtttttttgtagagacagggttttgctatgttgtcccagctgatcttgaactcctgggctcaagggatccacccaccttggcctcccaaagtgctggggttattgatgggagccactgcgcctggccatgttgtgattttttactcaccactgtgttttcccattagactgggtttcttgaggtcaacagtattgtcttgtttctctttatgcttctctctccctttagtgcctacctgagagcctgctacagagcagtccctcagtcattgcttatttaatgaaataaatcaaacttggtatgcgtctagaataactgaatgttggtaaggcagatgtttgtcaaatgcctgtgttttcatggactcctaaaaagagctaattaagtctttttgacttgctctgtatatatcaccttataaaattcatcatgaaaacacatcgggtagattttaactgagatccacatatgggctttaggaaatgtgtttttctgaggagacgcttcatgagatttttcaaagtaatttgcgacctgaaaatgtttaagaacccctcacatggatgtggagatttgagggctcccaatacatttgcggaaattcagaatggagaaataaggcaaaagacggaggcagatggaggtcaaatttcatctatattgctacaaaagttactactcaagaaatatggcttatatgttttgacaagtggtcttctgatattgaatacaagatttatgcacatttactcactcctcagcacgtggtctgggcatcccatctcatcctctctctataggagagagagtctgtcctggagcaggcaagcagagcgtgttcctctgggcaacttgttccccacagaagaaaaagagaggaggaagaggcgaggtggcactcacctaggttttttcccccaagtccccatcatattaggtcactttttcttcccttaaatgaggaacaggtgtggggagagaggccaggaattttacgctaatgagactccttctacctggagggacacatcaggtgtgcagaagaagggttctcccttaacagtgaagattgaaagactgatttctggtaatgagtccctcatatgttcacagaaaaatgaataggttagatgaaataagctccaaagccatcccaaggctccacatatgggaaacatttccagtcctaatactcatggcttacatttttggttgtttgggttatgtagggggcatacttaggcagcgctgttatttcttgctttgtggcctcagtctttttcatcctggatcccagagaacctgacctggcctgcaagttcctcatccagctggaagcaggtgctggggagcaggtggcctcccccgtatctccaactcaggaccacctggggcagggggagtgtggcgtttcacttgagccttctccttgccacctcactagcttacttaggaaaagcaagagaaatgggaaatgggagttggaaatgcagccaatcagcaacggaagagcctctggggaactcagggggcgaggggggaccctagtatctcagcctctgaccttagttatccctgtttgtgggggaaaatgcattttcctgttttgagggctctctacaatgcatctcaggcaaaaagtgaggaaattgggtatcctatatacatataaataacacccttaatcatcatcgaccaaataggctacactgcccccttatgatgtttcaggaaagcaatccgggcattcccatggcctttggagggattttccatgattctgtaaatccttgagtaatattgaagctctgtaataacaccaagctacttttgcatttattctagtcttaggtttgaacattataatattagttgtttaaattttcatagagtccatggttcagaagagttctggggaaatcatttaaattcatcctcctgcaggtcccttgatagggctgcaacttggctaacaaagacaaatggccttctatctgattctgaaaggtctccaggggaagattccataatgaaccacagtaatcatgaattgctaacatgaatgtgccccactttaagaaaacctgacatgtgaaagcctatgtggcaggataatttattgagatactaatctacgctttgttctctgtaatttgcctcccctgtcccaccccccgtccccatgaaggtagccagttctgtttcccttcctgtggaggtgatagagtttacttgtgctatattcctattgttttattagacagatgcacagagaaagagaatacgcttgctcatgtgctaatgctaaagtcaaactcctcaagtaacactataggggggcgatgctccttagaggatgcagctccacctgactcttcatcgtcagctgtgtgttcttagaaaatggcttttatctctttaacctctgtttgatcatctgtaaaatgaaaggttgatttaatgacattcaggtacctccctgctcttgaatctgtgggattatcaatctcttaagctccgactcccaggacagctgtggaacatttgcttaaaggttttggagttgggtggccaacttcagcaaaggaaacagtatatgcaatatttgtgacatgcttatacaaaaataaaatttgctctttgaaatcacatttaactgggtatcttatattttatctagcaaccccatttggggtcacctgcatttgggagatggaaggctgagggagaagaagtttgtttcttttcattgccatcaagattggatctagcattcaagaaacaggtttatacattttctttctctgtaagcatgtccatcttatttttaagctatcctagcacaattttcattgaaatcttcaaaattaatatttaacatgaaaaaaataaatgagacctgcccattttactaaaggccaaattttctataccttataaaaattagagagcagaccaataaaccctaaagcaagaagagaccagctgctcaattgatcaaaatgatagaagttcttctacatcacctctcccagcgagggtatgactggtgttactggtgggagttatatttttgtcctgtcctcaacatttctatgacacaggaaagcaaatggagtcaaagttctgattactttttcctataacactacaagcattttttttttaaatgtccttctgaactctccattccttaattttggaattgcattgaatgtcatcatgctatgatttaaggaaatcatctgtaaatcaaaacaatcttgatgatacaggttgggctccctgtgatttcttgacacaaaacaggtcaggatctaaaactgaatgtggaaagaaacatgatttatattttgtccaattagcccgtatatgaccttcatgtgaaaggaacatggccttggataaaaagactctctcattgatttatcccatttttaatcaaagtaaggtaccaacacatgcaggatgtagtaattcacagtctcaagattaaatgctgataaaaatttgtagcagttttagcatcaaatatatcctcacccataacaaggaggtcactctattagtgagcaagtctgggcacaaaatggggaagtccattgtccagtttgaataatgtagtggaatctaaagctttgtggataagaatgactgaccctgtaatgtcctcggtgcatctgtacttgaagtgagattaacataagcgtgatctgcaggaaataggtaccctttaaagataccttcagctgtgtgtgtgagagagagcagggccacggggtgtcgtggggtagggggaaaggagagaggacctaagagactgagtgaaggcaatttacttatcaatgttcaattttcctaaatgtcaacttgatctctctcttttcgtacgttacagttgagaaataggtttgatttgagtcacaggaaataataattaaaaaaaaaacccaaaccattgattactcttaatttgctttgtcaagaggctttgctttacttgcattcataggaagggcaagtggaaagtatttcggggctatgaaagaatgccagtgtgatgaggctgggaaattcacgggcatggttcagaactctgcttctcagatccatttcataacaacttaatatgctcaagtattttctgaggggcaagactgtcctacagcatagattaagtggtccaatttttgcctctgggagaaggaaaaaaatatccaagtaggtagacaactattcaaaagaaacattgcatagatgcttagctttggcaatgttctgatgctaagcaggggtggagagggtggtgcagagctgcgctctgaagcctggggaagcaggctgggctgaaagctgggaagaacttagatcagatgcgatgctgcctaatcaaggttaagacttagcctgttaccagggagaagaagaaagagccagtgaatctgactacataattgctatttctttcaaaaaaaaaaaaaaaaaaaaaagattgggaaaaagggaggaaggaaaggacaggcttagactctgtaggttatttctgaataatggaaatatttttaaattcttgttataattaatcaaatctatgttctttgggagtagaaaactaaatgaatgcatcattaatggcttagtgtaaaagtacaatcatgcaaatttaagtctcctattcattccaattgaaaactctcatgataatggttaacgtcttgcactttcactgtgtgccagccattgtgttaaaagctttccatgcattatttccctcacaacaacagatgaggaaactgaggcttagagaatcgaggcaaactcatcacgtctcaaagcttgtatatgaagcaaacaggagttgggtcccaaggtcttactccaaagttgtgttcgatagacatcctgttgtatttcttcctctgcctccctgcaatcgacatatccttgtaatcaggagcaggtttttcttaaggagccaaaagagagaagagataatttagatgataggaggaaaattgtggtagagcatatctttgtcacaaacaggtctttgaaaataccagatgactgaactaaaataaatgggagagagtgtacttatttgatgtggggtgtggtttactgctatagaaaaccagcaatggccaaggggccagtatctcaaagacaaagaccaatgacagagctggcaggacaggagcttttgctcactgtattctaggatggggtggtaaaaagctagggcattttgtaagcatctctagattgtaacttttgtcttttggattaaggagatgccaagagaagtagtacagaaatagggcttttcacaatttcaggagatacttaagtgagaatgcagcatttctcttgtaatacaggctaggtaggttagaaatctcttccccttttcaatgaaccaagacattgctaagcagttagtatagtggccctgtgtttaagtgacacagagggaagagcaacagatggttggaaacagacctggtttccatccatgcatctctatgaaggcatatcctccaatctcccagactcagtttccttatctgcaccacggtgttagaatgcttacattgctgggctgggtgccgtggctctcgcttgtaatcctagcactttgggtggctgaggcaggtacatcacctgaggtcaggagtttgagaccagcctggccaacaaggcgaaatcccatctctactaaaaatacaaaaattagccggatgtggtggtggatgtctgtaattccaggtgctcgggggctaaggcaggagaattgtttgaacctgggaggtggaggttgcagtgagccaagattgagccactgcactccagcctgggtgacagagcgagactccatcacaaaataaaaaaaaaaaagaatgcttaccttgctggcttgttgtgaggatcagagatcacatacaattgtggctggcatagagtaggtacttgataaatggtagttattaccagcccaccgtttttactgggtaggtgaaagaaggctaagccaagaaagggaaaaatgttaaaggctgaaaaaaaaaaacacaaaaaacaaaaaacagagggagggatagggtggtggcatctggcttgcgaaccccactgttgcccctcccaaactctgtccttttaacgagccatatgcagcttccaacagatgagatctggtgtctgcaaagacaaagcagagccaaaaggcgatgtaacacggaattagagactgcttttccctctaatgagccagcctgctcatttaaaatgcagtgctgtttggagcccagactgggcggcatgtgcagccgtgtgcccgcgccgttcctcacgtgcacatgggtggcttgagcgcataagcatgactgccaatatcacggttggttagcttgtggcccaatactgggcggtgtggtgtgtgcgggaggcggggcgctggagccgctgtcaaggacgactgtgggagtcacgcagcctctaagctacttgggaaattgactctcatcagccaatactctcaagatcttgctgagtacagaggtactttgggaggaaagtgagagaaagaagagatactagctgttcccccagagggctccctgactacccagctggaagaccacacacacaccacgaacacatacgacatacacacatcatgtgcacccaccacacagaccatacacatacatataccatataccacacatgtgtacacacactctacacacacatcatatgcacctgccacacagaccatgcacatatagataccatagatcacacatatgtacacacatgctacacacacatcatgtgcacatgccacacagaccatgtacatacatataccatgtacacacatgctacacacacacatcatgtgcaaatgccacacagaccatgcacatacatacaccatgtacacacatgctaaatgcgcaaatcatgtgcacatgccacacagaccatgcacacatagataccatacaccacacatgtttacacacatactaaacacacatcatgtgcacatgccacacagatcacgaacatgtagaaaccatagaccacacatatgtacacacactacacacactacacagaccatgcacatacatataccatgtacatacatgctacacacacatcatgtgcacatgccacatagaccatgcacatacatctaccatacaccacacatatgtacacacactacacacacatcatgtacacatgccacacagaccatgcacatgcatataccatatatcacacatatgtacacacactacacacatgcatatgcacatgccacacagagtatgcaggtacatataccacatgtcacacatatgtacacatacacacaccaaacacatggacacacgtgcatatcacacacaggccacaccatatgtacaccacaaaccacactcatgtgcatgcactatacgtaccatgcatgtaaacatacatactctatacatataccacacacatagacacacactatgcacataactatgacacacagaccacagacatatgcatgcacacatatcacacaccacatacacacaacatatgtgcacatactacctgcaccacatatgtgtgtgggcacatgcataccacacagagtgcacacataccacatgaacacatactacatgcaccacacatgtacatacaccccacactttacacacataccacacacatatgccacatacaacacatatatacatatctatatttatcacacacatatgcacatatcaaccccatgctgtactcatgcaccacacacagcacacacttttatgtatagataccacatagatatactacacatgcataaaaatgacctacaccacacatcacacatgcacaccccatgtacatgcatgtgtcacacccacaattctatacatactatgtacacgtagacaaacacatcatataaatacatacctcctacagatcacacatatacacctacataaatattacatgtcacacaaatatatatactgcacttacagtgcacacttgtatacacatgcaaacaccatgcaaataccccacacaaaacacacacaggtacacatcacacatgtacacatcacacacataacgcaatcctatacactacacacataagtacacaccacaaacactacacacatacacaaatcctcctatgcacacacacacatatccgtaccacaaacatatatacacatgtaccacccataccactcacatatcacacatcacatacacacacatcatacacatacataacaccaagtatatacacacaaaacaccacacagcacacatgtatatataccacatatacatacatgtgccccaacaccctacacacacatatacaagttacagacatgtacacacaccacacacatcaccctcatgcacataccccctacgcataccacacatgttcacacagtacacgtaaatacccacatactacccacatatatcacaaatgtctatatacccctcatacaaaacacacccccataccacatacatacacagctccaccatatatgcataccacacatacatcacatacatacacatgccacacaccacatacctgatcacacaacacacacaatgcacacacatgcagaaatctcttccatgtccacacacatgacacacacactcactactacacaacatacatgacctcacacacagaccattaacacagatgctaggagacacaaatgtgtcttgctatgtccccttgcaaaagtgtactcctttggggaccagaactctaacattgcagagcccagagttgtgtggcaggaaataccaactgaaccagtagtcatagagagtgatattaaggagggtcactcctgcttgtacttttcccactgggacacaacaccacaaagcagcctccgaattaatgcacacactgcgtcctagagaatgatgtcccatctcctctgagccagcatatcagccgcccttttcaagtgagttttcgggatttcaaggctggctgcttttggatggtgtgacaggtgatagagtgagtgtgtcccatggctccaccccctcatttccttcactgtgaagtgggtctcctgttggatgctgtattacttgagatgttaagactgtggatcagggatactgtaaacccttggagagtggtgctggctgaggctctgtgggcagacagggcaaattcgttttgagattggtacccatacctgtgaactgctgactgttccaggatggcagggacccagtgtaagtgacttgtcaccaaatggtccattgggctccttaagaactagtgccaacaggttgtgcattcaaaggcagcagtatccagatcagccttttcaagtggaagccagcagttttgggtccatacacagcctccatctctgtccctgtggcgattccattcatgtgcttatcctgccagctcagagaaagctgataacaaagactggctaatagcagctggctgcatcattttgtctacttggttgttcagtacctcttctgtgaggattataagtaacacccattacttttagtgggtattaaagtgtggtgcagcaatcttgacacttaatgcttaatgctatatgtccattgacatgcctctaccccaggactcctcaccaatctttcagtgtttttactcccaggcttctggccagcccagagtctcttctgtaatgtagccactgcatgtgcaggtgtcacctagcatttttttgcattgctgtataggaatgagagcccagggaactggtgtaagaaaatgctgatactctggctgctgcaattgtgctgaataataaagttctttgtctctgaccttaaatcttctgccagcagccatacaacagtgtcaggataacttgttagcttacaggcagggtaaaatctcagacccttcacagatcataaaccaaccttgggctttctcctctttctttcttcagctggtcacttgggacactcatttgacaagaggtaagagctggggatagtggatggaattgtggagggtgggctccctgttcatgcaacttcccccatgcctttggttccactcatttccatcttacaatagactactgctgagcctatgtgacctcatgaattggcagtttcaaaagaacctggattgagtagggcgcagtggctcatgcctgtattcccagcacttggggaagctgaggtgggcagatcacctgaggccaggagttcgacaccaacctggccaacatggtgaaaccccatctctactaaaaatacaaaaattagccaggcatggtggcgtgtgcctgtagtcttagctacttgggaggctgaggcgggagaatcacttgaacccaggaggtgaaggttgcagtgagctgaggtcgtgctgctgcactccagcctgggaaacattgagtgagactctgtctcaaaaacaaacaaacaaacaaacgaacaaaccccacatcacagtggacagtctgtatgcatggtcacttgatgttccatggtccagcattccattctaagcattctgtgctcagaaacatgtgggggctttctcaaaaagcatataataattttgctatagatggcataaccttgttccagaaccccagaagcctgcattattgttttctcactgggaacttgccataaactccacactatatcttttttctaatattggctctcccaacacaacagggcttgctggaccttatggcctgagtggcagggcaagcctggatctgctgcagagcccattcttgctcctgggctttctgaaagctggcagtcttctgagtctcccaatattcttaagtgtggtattggtaggtatgaaacgtgctatctccaaaagaagccgggaggcctgtcaggtgctatgcttcctttttttgtgataggggctgcaagacatttgtcttttactttagagattatatcctggagtcctaaagacttcacgtggtggcagccgcctggctcttcatataccttaccttctgcagggcatgtgtcttcccaagccctctggtgtatagcaacctcttgtcatcttgcccagtcagcatgatgtcatcattgtaatggatccatatgccattctgcaggatgtccacaaggtccaggtctcctgggactgtattatggcagagggtgagtgagtttgaaaagcaacagaacaaaaaagaattataatcaatatcctttctcggtcaccaaatcaatgaccatgtaccatgtacctgacgcttattaatatgttctgggaataaaatcacatcaggcactgcagctttgatcaggattactgcttgggtaagccttcagtaggcaacggtcattctccaggatccatctgatttctcagctctattgggggggctgtgataatactgcaggtctccaggtatcaatgccagctcagaccttgtgtctgatcatcctcaaaatatctgatgaatttcctttccccagtgtatgtagtttatttaagaaaggactagagaactcattatagtttatgcttgccatggttttatagtgtcattctacctatggatcctgccaccttttaggtaaatggggcccaggtctgaaaatctcagacctgggaaataggtgaatgatgatgactgtttattggaacgaccaccctctgcctcctgctcctctgttcctgccttcttttgattgtggcagcatcctcattgactgaccatctctgttgccccccatcttatgttcaaccaccttgatcacgcatgctcaaaatctgcttccagcggtactcttctggtttttttttttttttttgagacagggtctttctctgtcacccaggctggagtgcagtagcatgatcttggctcactgcaaactttgcctcctggattcaagtgattctcgtgcctcaccctcccaagttgctggggctacaggtgcgtgccaccatgcccagctaatttttgtatatttagtagagacagggttttgtcatgttagctaggctggtcttgaactcctgatgtcaagtgatccacccaccttggactcccagagtgctgggattacaggcatgagccactgaacctgactggtactcttctggttcttgatggcttatgctagctaattctcacagctccattgggatataatctcctttttccttatgaaacccaacatattcctgactgaagtatgctgaaatttcatcttagttattggcctggaagccagaataagagatgggacaattcctgaggggaccacctgttaccttgccgaggaggggacgttgctgtatctttctgaattggaaaaattctagttcttattctgggggagccacctctgaaagctctgaggcttcagaggaatctaaagcaacaaagcccttgggaccatccacccagatgtacccatctcagtttttagggtctcatgtttccccaactgggaccctgatttcataggagatctgagttggtttaagcatcactggggctttgaaactttaattatcaaattctgtgttggcagctcagctgtgtctgctcttccagtgcaggagagaagaggcttcctataaactaccagcaaggccctctggctcccactcttagcttttatctgtatgtcaactgctcttggtttctcacgattcccctgtagaacacttgtaccacttagtagcagccagcaaactccactgtacgtgtagctcatgtgttcccccctatatctttcagaagtctgaatcattgcacatgcaaagccattctcccccaacagaatgttttctcacatgaaatcttaaacaactgggctgccactaggtgccagggaataaccataccccacataccactcaagatgggctcctccttgtcagggagggtctgagtaacccagtcgcaaaggcttatctttactgcctgtttcctcacgtcactcctggtgtgtcttgtgtcttctgagcagggcacgccaagacaggattggaggtgtaagctatttgttgaggtaaactaaaagaataagagaggagcaggagttgtcagagagtcttgagatggaaatgccggtctgacacctactaagaagagagggaaagaaggattggataggaagaaaggaaggattgcaatggaccacagtgcagttttaggtaagtcttggccaggccaatgggaagacccaaagccatagttgctgagtagagaattccacgccaggcaggaatggataggtccagtacacctaccattccctgtcattggctggaagctctccagagaaccccacagtgtatccaaaggtgcagcagctgagggctgtcaatcagccattgcctcccagcagatccccttaaaaggagatctgagtgatccacttccatggccactatggtgatggaacacccccatgtataggattcatggaggcagccatcaaggggagagtaaagcagagccagtgactgggggctcttcagaaagtaaggggaagttgtccaggcagcaaaagcttagggtgagggttcccagaagccaacttttaacttagctttccccattcagccataacttttttactcctttgctaagatggaaagaagttaaagaagggcctttgggtccaaaacacattaaaaaacaaaatacagagacacttgtaaccagggcctaaacccaacactggcaggtgtggtaactaccatggcatccaaagtaccgaggcatgctgagagtggcagcctcagggacatcccaggtatgtcagcccacatcactcacttggaatgccatttcccttcaacttccagtgagtctctccaatgatggacaggaatgtgtggaagcagaataaggtagtgtcactaccaaggaaagatattgaggaggggacagtaacctgcataataattctcagcttacttcccatggaagtaccggatgccactgtggaaattaagtgattcctgatttaagacattattgcttcagggtgtgcctaagcctgaaagtcccctacatgcatgaatgcaattctctatctaaatacccaattcattgtcaggaaaaaatgggccctagagagtttttgtgggtacaaacaattgtacccagctgaccaaccaactaaattctcctattcaaagacttggaggaaatgagtccaaatattgacagcagaaaattttagtgacccgtgctctgtttcttgggctagtggagaccattaaggattatgctcctctctaggcccacatctggccactatgtttcaagttctaggttcatgggatttcaaggttagaaaggaccacataaaccgtgccgcccaatccaccataagctgaaatgttgatgacactgtcatggagaggtacagacctgatgacatcacatttgcttccctttctgctgacctggaaacagctaaaagtagctacttgtccatgccctggctcttataactatttcttctccaaggttttctgtgtccaaatgtctggaccctgtgatttgaggctttacacattgtgcataagtgtagttatcataataaatttgaaattaaaccccataccagcaatcagctggtatacagcttaggaaatagccacacaccagttaaataaagcacagttaggaagcatatcttctgtcaagtaaccatgcaattaatttcaaagtaaaaaataattggattatctgtgtcatggttttcttcattagtgtagataattgggagattttagtagtatatttccttccttcttgaagaaaatgcttatgatataatgatggggatccctccctttcaggtttacacttggtgggagtttgtaggagcttacatctgatatctttggtctataggtaaggggtaaaataacagaaaaggaaccatggttgcctggaccatgggttaaaaaaaaaatctcagaaggcccatcagcacaccccaccactccatgtgaatgtgacctctgccatacttggccatgtggaggttggagccacacaggggcgtgctttctagaagccaattgttagagttgggctggccaagtgggatctgacaatggagtaacagaataaatccaggcaggatagctcctgggggcaagggctgaaagacagaaagaacagcaaggagagaagtgagacggcgtggccccgcctgctggctgggctccggctcaggacagtttcttaagtagcgtcacaagaccacctgcatgaaaatcacctggagcgaagggcgcggtggctcacgcctgtaatcccagcactttgggaggccgaggtgggcggatcacgaggtcaggagatcgagaccacgatgaaaccccgtctctactaaaaatacaaaaaaaattagccgggcgcggtggcgggcgcctgtagtcccagctgctggggaggctgaggcaggagaatggcgtgaacccgggaggcggagcttgcagtgagccaagatcgctccactgcactccagcctgggcgacagagcgagactccgtctcaaaaaaaaaaaaaaaaagaaagaaagaaaaaaaaaaagaaaatcacctggagcttataaagctgcaggtgcctgggtccctgtcacagacctatttactcagaatctgtgggaaccaggcccaggaatctgcattttttaaaagttccctggatgattgttatgagaatgaagatttcagactcactgctccaggcacgttgtggcagggtcgatccacatgcctaggtgtgaatcattatctggttgtgacaggcgcatcacagaggggtcttcacagcccccactggcattaatattcacaaggatcaaatccaaaatggatttaatgagcatgttcttcgtgagagatgctgttaggaaactccaaaccagcaatgggcaaaatttctgaaggcagaaagcctgaaaataagccacagtttatgttttcagaactactaagggtggagcggctgtcttttctagctggatgtgctgaataagaaccgtgcaaaacaaatacagttccccaggggcgccgtgcatgatttatttccagatttaatgaatggccacgtgcctgggttagtggaaaataacccacagactgactcatccctgaaaagtgcagtggaaaagcctctctcgctgatgccattgaaggacactgacccatttccacatcctaatctcctggtaaaccgggtgacatggcgggtgaacgaggtatgcaggctgcctgccttgcctctgagaacacagtttctcgacatcccctgaaatgtctattgatctgagcatgtagctgatgtcaacactgattgtctgaagagaggctactcaatatcacaaggtcacgacaagaaaaaaaaaaacctaataattcactatccctgaacacaaaagactgggcgttgttttcttccatcttaacagtatctttctgtggctgctgagtgactctcctcctgtcactgcccttgctgtgggatttaggtcttacattcgcttttatttacctatttctctcctggcttaacttttcagattcatgtaagagcaaacacctgctttatatgctctgtccctgctgcagcctcatcgcacaaaaggctgatttaactcctcaacagaaagccctaatttcacaagccctgggacttctctgaatcacattttctgccctaagttagcagcaccatttctcccatgaaataatgtttactggtgcttaattgattgaattggcacctgccttgcaggtgtactcttgggcttcatgaatttgctgccgtttgcaaggtctttggagaggcgcggagggaaaatgccggagaggagagcattctggtgactgtgggggggggggcactgttgtcagtatctgctgccggagcccacgcagcacttagagatgagtcacacaaagcactgcacctccccaggaagggcggccacctcgaggagaagcaggtagtttttcataacacagagttggctctatccttatctctggctactcctactcaaaattataaggtagacaaagtttgtgttcagagctaccactcttcattttttgcatggtatttggtcctttgattcattcattctctcctgccctcccacacctttccttcctctccatcctctttctccctccttcccttgtgtaggaaaaacatttcttgattgcaccctgctgtcaaaaagcataggataaactgatttattaatacatcaaggaataagtgactaataaggtgaacattactgaatagtatgtgtatgatcagaggaaaattttaaatcaaaggaaaaaaacaatatgatggtgaaaattcaaacaccatcacagaggtgcaggagacagtggggggagggaggctctccattgttcctgaaattacaagactcgttaacttccttcttgccttttctttaaggttaatagaaacccccgtttcttggatcacacgtcacaggtatcaatttcattccacatattcagatgtgtctgaaacataattctttgtttccctttctttctttttaagcctccattcctctggggttgtagaaattcaatctaaattaatttggcttatctccccagcctcccccagcccctttccttggggttgcatttacatttggaggcttaggcagtgccaggtattgggaaggggacatctggttctcgggatcgttcgccatccatgctggcctccccggaggtgtccaccttgccatctggtcttcagttattggttcaccaggtggctgctgagtcgtccctggttcctgaccatgggctcttcgcatccagctctctctctcagctacttccaggactctcctgggcacaaaggtgttatctgtttctgtcacagaattctgggcctcagaaatctccaagagactgtccaaaagcctttcttatttctttgccactcgtgtgatcataccagtgcctcacactaagttggcacacaagcataccattattctgtgggatcatgttgctttcctgggctccagctgggaaactgaatgcaagttccttccttctgcaggcagaaccaaccaaggtgggtaaggaggacatctgtcatttctccccatgcccgtgccaggctaagctctggaaaggaggctctggaatgtttcttggggacccaccagcctctgagttcttggggacccaccagcctctgagttctttcttccagctcccttccttcctgtggccaatcagtgactcctcttttctctaactttttgctgtgttatcttttcttgaagccaaaaatgtgaagtgactgaatagagggatgacccaagggatggaagataaaaggtggacaagaactgatttcttaaaattttaattaataaattaattcattattattattttctgagacagggctttactctgtcacccaggctggaatgcagtggcacgatcatggttcactgcagcctcgtcctcctggggccaagcgatcctcccacttcagcctcctgagtagctgagaccacaggcacacactgaaatgcctggctaattttttctatttttttgtggagacagggtctcactatgttgcccaggctggtctcaaactcctagccttgggcaatcctctcacctcagcctcccaaagctctgggattacaggcatgagccaccatgtccagctttttaaaaaaatttttattttttgtaggtacatagtaggtgcgtatatttatgggttacgtgagaaattttaatgtaggcatgcaatacataataatcaagcaattgatttcattttaaaaatccagcaaactgaagaacactgtgctagccattgtgagggatgtaaagtgtggtaaagcataggccctgcttgtgagaaacatacacagaaatgtagtgctaaatgccaactcagaagtcatatgaattcataaggaaagaaaaatcagttcagaattaccctcacactttaccattcttttcttttttcaatttttttcttttaaagaattgggactgttcagctgccagtgggaatttcttaaagttagaagctaaatagaacactagtcagagtctatatcaacaaatgttgctatagctcaaatctgtgattcaactggagatatcaaagctttcccatggaatttacttactttgagcagtactggatacaaacgaattctaagacaactaaagcatttgtacacccctcccccattagaattgtaacgtcgtttgtctttttattatttatgagactttatttctaatattaaaaatttagagcagtagtcacacaatttggggactaatgtggaaggcaatgcttgtagtagtgagggtgggcagggctggctgctgctatcatagcccagtgtctcagtgccttagcacaacgatgcttattttccacccacttcacagtcctttgttctccacagtcacctgtggcccaccctctgcctttaaagcatggctgccaggttcaccctgggtatgaacactaagcccactaatgggggtaagagagtgtgcaaaatcacatcacagtcttataggcccagctttgaggtaatacacattgttccttctcattttcagtggccagaactcactcatatggctcatctaattgaagggagctgggaaatctcattggctgtgggtcccggagacaaaggccgcaggtttgatgagcacatggcatcatccccgctttatttgtgagcaaaattctctagctgcataagcctcccagtgattaaagctttgctagcaaagaaccagaattgtttcatatcataaagagtgtcagggagatatggcgcttccctctggcctccctcacttcctcgctccccttcctgatctcagtctgccctgctcaggaggatggatcagcaaggctagagcctgcatctgcacactcacgggcagccttacagggttcttaggaaagctgaggcaatagcagtcacagctaggcttctcccccaggtactccccagtgcctggcctgtgctgatgacagcacgtgagtcatcagcactaaagaatgccagcttcatcactggaagttggcagattctcagaacagcactggagagaaagctgggtgtctctgctgggcatttggggtgaagaaggaactaaaaccttccgagtgtttgaatggaggctgtctgtgccagggaagtgttttggtctctcttgtattgttcaagccaagcccaggcccaggaaagcactcactttgttgattgaaagggaatccttctgagacagaaaatgtcaacagtgctggtgggaattctgcatctgctctttaatgtctaagtggttttaaggaaatggatgaacctggtggtttcagatgaaatattatttcctgccttcaagtacaacatgtgtgtatatgcaaggcagccttcttctgcaatgagtctcaggacagagggctggcacctcctcaatggcagtgacattgatatccatggatcaagtgtgaggagctggttggtttaggcagccatcttcttaacatgcctcaaaaaatgggagcccaaagaagggacctttgcctcagtgagccaagcttataacaaaggagcgaaggttgtcagctcatggtcccaggagaaaggcagtggtcacccaagaatgggagtggtggatggagagtgatagaaagctaacctaggatttcagatggaggcatggttgaagtcctaggatggcaggatgagtatctgaggcggaatgtacaagtgaaggaactctgttgtgctttcagttttacttctagtaagttctaaaccagtaaggtgttagattttctgttccggggtctttcagcaacaaaacatgatctgtcttcaactgatctctgtggatttagggggaattaggtatatgaaatttgaaagtctcttccctctgacacttatattcataagatgtacaaatattaattccaacacactcttcactgctacatataatttcacaacctttttattcaccatagagggtcaggctcttaattgcagtattcaccccatagatggcagtggtaccagatgctggctccagagattcatgctgaggtgtcttccagaacattgtcaccagcaacgttctggacctgctggagtgaggtcaggattctgaaaactttcttcttgtaggattcttgatcagtcttgcctggcttagaaaatcagacgagagtctgggtctcagctgtgaagttacagatggaggcatggctgaacgtgcatgtactcaaagtttacattttccacgcactgtttccctgccatggaattacacaatcactttttctgaggatttatgtttctttctaaaaactattattctttttattgtttgtttgtttgttttttggaaacaagttctcgctctgttgccccggctggagtacggtggtacaatcttggctcattgcagccttgccctcccaggctcaagtgattctcccatcttagcctcccaaaagtagctgggaccacaggcgcatgccaccacactggactaatttttgtattttttgcatagacagggtttcgccatgttacccaggctggtctcaaactcctgggctcaagtgattggcctccctgggcctcccaaggtgctgggattacaggcatgagccacagcgcccagccaggatttatatttctaaaaagaagcctaattgccaaaagcacaaggaacatgcgtttgatttctcacgtaatgatttgagtcagctttttttttcagattataaaactgtgagataagctcattgcatctcctgtccacagaaaatcaaaggggtctttgtcttttcattctgcctgcgctcaacaatgatttattgttgaagacctactacagacccagggataaattatacagagaaggagaaccttgttgccaaaaagtattgaggatatagtgatttgagattcttaccttcaaagaagagttgaaggaattgaagaaatgatctggaattatggatttgatttttggatgaacactgaactattgtaagacttggtagagttagttgacaatctgaggctttcgttctcccattcatacatgaaactttaggtaagatgtactagaaacaagccagatactatttctagtcctgaagtcatcctgaaaggtatcttcagaatggatgtcattctcaatgataatcacgtgatttgctaagattagaagaggaaataaatcagctaagcaaggcttatgtcattcagaagagaccaaagtgaatatcaagaacattatcaaggtaggtgttcctatccacgtatagtgttgtaagccagtaacaaaagtagactgtagacgtagttacccagctgaatatttaaatgtatccttatttgactgtgcaatcacacagccaaatatattcaagggcggtttcttttataagaaaaaaaaagtaaatgaaatgctcaatgatgacattagctcaattttatgtttgaaaaatttacttgcacccaagtgagaaaatacaaaattaaagttctcactgcaacaacaatggaccctactaacaaggagaggctgtgccacacatgctgggactacatgggatgtgggtcctgaaatctagaccagacaattggctgcaactttattattgcccttcacctagagcttaaaaaaaaagctttctttagggggttatgcaaagagcctttatcttgatagttacacccagcagtacatcttggatggcaccaactgaagggtttacagaaaaaaaattattatttgttgcgtgttctggtactggctagatgcatgtatgaatgttacccatgaataattttatctttctttatctcctacctctggcctaccaagacaaccccatcaattcaaaaagatgagacaatgcctatatgagagtgggaaaatgggacctcaggccctgtggccctgctgccaaccttgcttggttattggagcccaggggtgactacagaagcccctgaccctggtgacactcaacacttttcagtgcccatggctaggatcctgatctatctctttcctttatagctatctagtgccttgggaatgtctggcatagcttttccacatccaaatcagcctagaaaagcccaggttcctctgtcctttctatagaaagttctgagttcctcagttcaaagttctgagttcctcagttcagctggagctatgggaacaatactgggaactcttacttcctttgggaaacgcctgtgcaaatccaggtatagggaaatggagctcagtatagtggaacagagtttcagggctgttcacttagaattgctctgatgtggcttagtcccttcccactattttctgttgcacactttagggatatagatgataaagaaaacaagcattgccggtgccacctccgttacctacatacgatttgctcatttaatcatttattcaacaaattctaatggaaagtttattattgtgctgtgctagcctctttgggacattcaaagttgattaagacatgctgcataccctaaacggagttcattgtatcatttgagagatgacacacatacaactatccatcacatcagctagaagtgaagagtggtgcttagggagaaacctaagcaccatgtttttcagatttaaggggagacttcagaaagagagtgatagttcagctaagcctggaaagggaagcatatggcgctgggcatggataactacaagacactggtgacaggctgacagtagatcaagagcaaaaacagggttttgttgttgttgttttgttttgttttgcagggagtgggagggtgaggtagcaggtaggaggtcggggagagatatggagatattgccactgattctggacatgttgattttgaaattctagttagatatcctggtaggactttcctgcaggccaaaaaacaaaacaaaacaaaccacaaaaataaaagacagcagagtcttgagaaattttaaacttgggattatacatctgcacaaagaggcctgttgcgatattggatgttgcctaggaactggggctaagaactacagtgaagcaattaacactctaagcaacagatactaatgtcttcattacttgcaggcagcccatataccagtacccagcgagaaactcaggctgttctctgcacagctgctggaaagctcagaactttggggagactcttagctagattagagcaggaaggctggtctttgggaaggggataatattaggggcattttggtgcagtgttccccatgactagaaactgatttgtccctttaaacaagaaaccaaccaaccaacaaacctaacgctgccctttattcctgatccagaaccgatttgaggttgacataagtaccccttttctccttttgctatctggtggaccccatcttctcagaatgatgtagacacgtgttctagcccttctgtgatttgtccactgctgtgctattataagtattattgatcacacaatccattagggcaccattcaccataaataatttatctcttcaggcatgagctcgtctctgccacagatgccatcagcaagaatccccttcaggaggtttgtactgaaggaaaaacaaccgcattgcagatagagtttaagcacacaaggcccagggagaaatgaaaataatgactgaccaaaccctgtgcctggagactgcattctactggggatgttctgtgagagacagaacaggtctgagggttttcagaccagcattcctcctacagaaggcatgccgtcttgacaaataggtatacgcctagtctttctagctgaggaagtttgtttaggcagcatgtcaatatttgttggacatactagagcagttctagatgttataattgctgggagctggagggacagagggaagggcaggaacaagcagcaaaagaaatagcagacattgtcttatatctgtatggaccttaaaattctattggccaaataggaaagcacctataatcaaaactgcaagatctctggcaagaacaaaccaacaaacaaatgaacaaaataatgcaggaggatttaagctcagattgcacctataacttgctgacaggctgtataacaataacagtgctcagattttaggctttaagttggtttgtcaaggaggaagagccatatagctatatagacagagaggaaggtaggggagaggtggtcataggggaggagatgggtatgcaaaagtctgcaattgggagctcacgaatcacggatgccagcaaacagatttcagctggggcaaagattccatgatgtaaagccagagagtaacaagtcagcattgtggaagggagctgcttctttatggctttcccacacaacgctagagtcagggggacctttcataggtagagaagacctggggaaaattcaccttttctccctttttaaatccttctttcttgagcttcctgggacttcccttctactatagggtcttggagagaaaaaataataattaagctcacttataacacatctatatgctaactgtattagtctgtactcatgctactaataaagacatacctaaggctgggtagtttataaaggaaaaaggtttaattgactcacagttccacatggctggggaggtctcacaatggtggcggaaggtgaatgaggatcatagtcacgtctttcatggtggcaggcaagagagcttgtgtaggggaactcccctttataaaaccatcagatctcgtgagacgtgttcactatcatgagaacagcacaggaaagacccaccccttgattcaattacctctcatcgggtctttcccacgacaagtgggaattaggggagctacagttcaagatgagatttgggtggcaacacagtcaaaccatatcagtacccctctgagtaagttaggatatagacaagaaaacagcccaagtcaggtagttcaataaagaaaatgaataggggaatcagctacaaatgggttgtgagagctgaagagcaaacaggagatgtagaggcaaagattagcaatggcaagaactagaggtatcaaggagatgtgcctggaccacccagacaacactggaggcctggtgtgaccacaggggaaatgtggacactgccagagacatccccaaacagagagacagaggggctggaatactaccacttctttctttcccctgccctctaattcctgctaggatttccctctggcctaacttaagtggaagccagctggtcaggacccctaggaagtatgttgtaggtaggagaaggtggggaatgatcgacattcccttgcacagtatttgtagatgattctcaaagagaagcaatgattgtctccagtaaatagatttataatagtggaattaggcatgaagtgaggcaatatttgggagcaagttcttcttagtgactgctgtggtctgaatgtctgtgtcctcccaaatacatatgttgaaacctagtccccaacatggtgcaattaagagatggggccttgggaggtgattaatggggtctgtgctcttatacaagaggcccaagggacgttgttcatcttttccaccaaacaaggatgcagcaagaaggggccatctatgaagcagaccctcaccagacatcaaatctgctggtgtcttgatcttggacttcccagcttccagaactgttgcttatacatttctgttgcctataattactcagtctaaggtattttattacagcagcctaatacagtaactctgcaattaacactactcagtcctctgctgatcttctggtagagcatactctgctaaaatcagtgttgttctgcaggtagggagttacccagatcttctttgagcagtctgaggttccttccactatgattgcctaaagtttagctcagtgaagaatcagcaatcacttgtcttgacccaagaatacaagagctaggggctcagttaaagttcaggaggtgcttatcaaagtctatggtttctgcttctctaactcagtcctagagatgaagtcttatggtctacaaaagtctacagcttccctttccttacaaagatcctctattgttgtttatgagcccctcttgttcctcagggatcttgcacatcccagaggagcaatcttggcctgtctgagtttcttaggtttgatctaagtagcagattcaaccacatatgagttctatcaaggccggatggacactcatggatactgggtctctcacagaaatcctatctccaaggagatgctatttcacaatcattagggattgtatgcctttacattaaatatttcaaaattatttcaaatagtggtcatgacaagagatgataataagaggacagggagattctattttattttatcccaagaagctaatgttgatgtatattgcattgatttaatatagttcacttaatgtgattgatcaaccacaggaagacggcctttatggagacatgattcttactcttatgccaatttagtcagggctaagaagaggatgtcaggtatttgctggtggtagaggctgtgataagttcaggactgtgcaggcagatcattgctttcagagagtgggatatgatgaatgtgctattcatctgtttagtgctattgccacaatttgctggttcttaaacagagctttacaaaataggcttgttgttaggccaggctgctaattgtgctagtaattaaaaattggcagtgctgagattggcccatattccctacctcaaaaccttccaagtcagcgtttgcctttcacaatgagcaaaacacctgctctgtttcctccactcattttctaggaccttcaaatgccactcagttgatgctttcacagagcctgggaggatttctggtgtttcattcagaaagactgtatgcacactggagaaagcaggactatatatagccagggccgagcagaggatgacctccgtgaatgctccaaggagccaaggacatgactgcgctcatggcctcagatcaccctcctgccaagattctttgatgacaccaagttttgctaagattttctggctctgggagcccgtgtgtcgattcttggaggttgagagccacgtggcagcctgcagcttgccggcttgtctgtgcacgcacgctcatgcactcacattcactgagagttgatgcgtcatcctcctatatttatccagttgctgtttcagtggctctgagaagtgtctggagaaaagcaaagctgcttcctcctgctatgcaagctgtctgagctccagagacaggctctactgtcttgttctgtgtgtgtggagaaggggcatgcagaacatggttcccagagtgcctgggtcactgatgagatgccctcttttttcccccagccagtctagagcttacagttcaggagcaggcagctttggcactctagccacagccccagtgtttttgctcacgcccagttaggtctaactgggagggccatgatgtgagtagaataaacatctgggtgaagagttggagatggccagggccctggggtaagacaaagtgggagcaatagctacagtaaggaatgagtatctggaaaggtatcattgagcataagagctgaaagggatcattgataccatcttcccaagacagctgttttacaggtgaagaaactgaggccaagtaggtgaagagtcacgcagcaccagtgctgatcctgaagtgatgcacttttaattctagagcagtgactttccatgaccctgtgcccagcaggtggagcctcacctcacagctggccattctctggcaaacatcctgcagaatggaagacccaaagacaatgtgctgaagaccaaccatgagtctctgtcagaggagtcactgataggtgatgggaagtgtgctggagaagtggctgcactcaggtctctggcttctgctgggcccccttctaacatagccttgtcaccactctgttgctgaggcattgtcacatcctgtactctggccacctcccaggcacatccttttacaatcaccactttatactttgtggacaagcacagtacccacagaataactcactctagaaagattcaaatagatatatccaaataaatctgggcttctttgccattccttaaagcctattacctcatgataacatatgcaagagaaaaacaaataccattccaaattcttgaagaatgattaatatattgaagctttccttgaacaggagtaaaagagagttactctgaagtgcctattcaaacttgcaacaaatccacttttccattcctgtctcccccaaaccccacagctcatggcagctactgaaatttctcttctctctttcaaaatctccagcctaggttgcctctcttgacactccctccttccctctgtcttgctatccttgccaagttctaaatgttttcattgcctccttaggtggctctatgccctttcccatgtagatcaagtaaacctctctttactttctccccatactttatcttttctacccatttctctgaccagcacaccaaaggcatccaaaggcataggaactgagccactgaaacaataatcttccctaaaatatggtgaaggagattattgtaaattcttatgctttatattttaaaaaaatctttgtcacatgaaaatccaaatctgattgatcttcaaccagttgtacttggttgggttgctccattgttgaattcctacagggctggaagtgatacaatattaattaaaggctctttaaagatgatgcttccttatttcaaataggcttctgctgcttctcatccgggggaagtcacaagtttctctcctggatagcactcttcttaggacgttatgggtgcattaccagctgcctgttgccagtgggattggtatatccttttttacaaggttctggtcaaatcttaaataaattctgaagaacaataaacccttcaggaactttcgctctatgtgcaatgtgtctgtaaagcagcaaccagtaggcatagagcatttgacataatttcttgcattgttgggaaccttccttctccctcgtgcattcctgctttggacaatatgataggagttttcattcttttgaaagcattgggaaaagtagctttagcccctctcagccctgttcacttttccctgagggactagtcatgatttagctgcctggtgaagtggggagtttctccaggctcatgggaaactctgctcttcctgtcccttcttcttcggatctccccccgagggtgggtgtgttttgcccacctcctgtcttgtgggtggcagtcatgatggggttaggagccagctctgcttccagggccaggtctcaaatcctagctctcactttgttccagtgtagagacatagcagatgcagatgatgcagctgttttgctctgtgtgtgtgctctgaggagccaacccttccttgagtgagatgtaccaagtgttagacctagggaaaaacattagagagtctgcctgtgccacagttaactcctactcctcaatctaacttatccttaataaaacaggtttttagccaggcatggtagtgcacacctgcagtcctaactactaactacttgggaggctgaagtgggaggaccacttgagcccaggagctcaaggctgcagtgagctatgattgtgccactacactctagcctgggcaacagacccctatctcttaaaaataataaaaaaagattttttttaaccttcacttgtctgatttctccaattgtttctcagtagcacttgtgaaactgtagtatcttcattcaattaacataaactaatattcaactaccaatgctgtaaatacccctagggagggagtacattaactcataaccccttatgttgagtgaatctatgtcatgcaattagcattatccagtcatctacaatgaatgagtttaaagccaagaaaaacagaattcatcctagatgaattcttaggatgttatcaagggtggagatgaggaccccacaccccatgatccaacttacagtgtatttttatctcagtgcttggcagaccaggaacatgccctcttcctcctggtaagcctggatgtgtgttgatatcagcacagtggtgtggggaacaggggtgccttggggtcagactgcttgagttaatcttttctttaccccaaccataagactttgggctgcttacttaaactcttttggtcttacatttcttacctgggaaattgagataatacctagtaggatcattgtgagaaataaaatgaaagaattgtgtaaagatctttgaacaatgcctggcaagtagttagccctcagtaaatgtcagtgattattatgaatagtaagaaaatatttttctgccacctaaaaattttccttgaggatgcatctttagaatgtgtcaatgggaaagtatgccgtactttaaaaataattttgttttgcaaacattttagaacaaacacttttagcgagaaatagttatattgctttctggcaaatatgaattgggatttacttgttaaaaattagaaatacgacttctattgctttctccacccataccatctccagaaacatttcttagctgcttttacccaaagacacatgtcagacctaagatctagtgacaactgcctctggaaggtcttgacatgggcccctcagtggaggcatttctaattttgaaatgagctgtgtggttcaaaagctctatgctttccaacaagtagatgattgataagactttctcgttcactgatcaagcttgataaaaaggaaaaacaggaactaaaaataccctttgcatttgaactgggggcactgaaagtacaaggaggccaagatttacatatgtgattacatagttatatatttatttaattaattaattaatttatttttgagacaggtctagctctgctgccaagactggagtgcagtggtgccgttatagctcactgtaacctcgaactcctgggctcaagtaattctcctacctcagtcttgagtagataggactataggtgtgcaccaccatgcctggctaattaaaaaaatatatttttgtagagctggggtcttggcatgttgcacaagctggtctcaagctcctgacctcaagtgatccttctgcctcacttggctgctaaagtcctgggattacaggcatgagccatagtgccttgtccacataattatatatttaattggtagtttgaagtaaaattatccttaaatctaggtatttttgttgtcacatgtcataaccttgtaattgttgctacaacaagaagagaatgcctttttgctgaatttttaagaaaaactcaacattctggccattataccatctaggaattttacaacctatagacctatcaagacagaaattaatttgaaggtcacatcagccttcatatgaattttctgtaaaattgagatgacattttacatgttaactgagtaaaagtgacatcataaatgatggtcatttaggttctgtttctcttttccagctggaaagcccatgtgagaggtactttagggaaactctcgctaagtcagtcctccaccttttcatgccagggaatcctgatgttattcaatgcatttgccatacattgtacttccaccgaacaaataaactaaaagtcactaacctgaagtttatcctgtaagcaaaaagttatcagactggaaatacggatttgttttttgaaacggagttttgttcttgttgcccaggctggagtgcaatggcgcgatctagctcactgcaacctctgcttcccgggttctagcgattctcgattctcctgtctcagcctcctgaggaactgggatcataggcccgtgtcaccacacccagctaatttttgtacttttaatagagatggggtttcatcacattggtcaggctggtctcgaactcctgacctcaggtgatgtgcctgccttagcctcccaaagtgctgggattacaggcatgaacgactgtgcccggcggaaatatagattttaaacttagcatatgaacaagtgtggagagtaataatggcagaaaattgatatcttttattgcaaatcttccatctgcacctaagagatagaggtctcggacctaagagcctaagctagtatcccggtggaggcagccactaaattcaagaccctcttgctaatacgcaatgtaaagccaagagtaaaagcaaaaaagccatcgtttcatgaaagaattcagtcctgttttttttttaaatgattaagagaatatttatttaagcaagaatacatacagtcggctaggtgcggtggctcatgcctgtaatcccagcactttgggaggctgaggcgggtggctcacttgaggtcaggaattccagaccagcctggccaacatggcaaaaccctgtctttactaaaaatacaaaaaattagccgggtgtggtggcactcgcctgtagtcctggctaccttggaggctgagatgggagaatttcttgaaccaggaggtgcagagactgcgccactgtactccagcctgggtgacagactgagaccctgtttaaaaaaaaaaaaaaaaagaatgcatatggtcatcattgccattgccagacttgacatgagatgttaaatgttcagcccaattttccttcctggataagtttttcttttctatccctgtcagttttgaaaacataatactagaagaagaggggcccaattccacagagagctcccaagagagggtttttgggagcgggtctaaaattgggatagacacttgctgatcttgcataggtccaacaaatcaaggcagtattttggatgagcccttggcggttagggttgttgtactgaagcaggtattcctgtttaggccaggcccttatggccaatcgctcagcttgtgcccactgggtctccagagatatgtcgtattcagctgggttgagggttgagggcagagtggccagtcgcgatggagtatactgggagctacatcttggccacccagcccagatctcattctttgtgttcttttgggattccaatgctttcatgagtaagaattctcatgaattcttatggaaaatagcaaaatatcccaggcagattctctcttttgcatataaatcttaaggggagagggaagcaagagaggcagatgtggaagttggcagagcagctagcgaggtgctaagtggagacactagcgtggggagcaatgagaagttggcctcagaaggcaatgagatgtccagggccaggggtgccactgggatctgagagcccgaacagctgtgaactccacccccccaccaagttctccacaaggtgtggttgtgtggttgctgaatgttcctttccattttctcactttcctgttcattcttacaataacccccaaccaccaaatttgggtctgtgtcccttgaacccaaaagaatctaacattgggtcacagtttctatcaaggatctgaggactaggggcaatttagtgtccctatatgttaggactcccacttaaagaacttggttttttgatcctaacaagttccctgtaaagaactccatattctctctcttcagtgagtgaaataataaaaatgcaaatctccactcttcccctgtgtgtcaaagacattccttttcaaggaggttcattctaaagtgacctctgagtaacagtacaaagtagtagacagtagcttaggtattttcaaaggaacgggtatgcctaacagtatctaacatttattgtgtgattctttaggctctgcactgaatatacattacctaatctaattctcaccacaaccctttcagatgggtataatcctattccctgtttatattttagtaagtgactggagatcacccaatttagttaagtggtagaattggggttcaaatttggttttaactgtagagcttgaattcttaaccagtgtgctatactaaaagcaaactctgaaaaacacatctcatccaatttcttgacaggatatttctgttcccagtgatttattctattagtaggtccaagtagctgagcctttgggcaactcccaggactttctgcagtggcctcctgtgacccctgcactgtctagtggaaccagggtatgtgttctgtgttccactgaaaaatcacaagggataacctaccactctcagcttgctctttgaacgctttaacccagatttttcgaagtctctacttttacctggttcttgctttttactgcaatttccaagggatccctgcctcaggccttttttccacccaggggagagaagatgtgctatcatatgattttattagacaagagaaataggcccaacatgtactgtagcattaagatagcaggttgcagtggctttttcggtggtgaaacatttccagaaataagaaaataagtcccatcaccaggtctctagctgtgtttcttcacactggcaccagacagaagctctagaaaatgtaacatataatgtgccatcccccaatgaggcctcattggcagaaacaccaacaaaagtcacacaactctgttatgataatgtcaagcatctctcatcagtatgccagctccagggcctcagtcaacagatgtgaatgggaggatagtggtaattctctcaattgttcactctggggacattttcattcagatgcttatgtgtgtttcacttgatccttcttacaacctcagtgggaggctgggtcagatcggggacagtttcccaagtcaataacgacttcctagaaggaaatctagggatttttctctcttagccacagattcacaaacatacccattctttagttgtctgtaatgccattaacagcaattatttcaatctatgtatatagcattacatgtttgcatatagatatatttgctttatgtgcacctttgtaagaacacacctcttgcttacaagagtcaaactgtgtctttgttttagtgtcctaattgaaaaacatacacgtagaccaaaagaggtgaacacagattctcagagaaggggtggaaaaagggagtgagtgtgtggagggagtccttttcagaatcacctggggatttattcaaagtgcctttcccttgctgccctgaccaccccactgcaccccagaaggaatcattacaattgagggcatgctgaatccctcagatgcattggagtggaaaaattcttcagttactaaaatataaaatattttcaatgaaactatgataactaggtgcctgggaatggattacttttgtagcaggtatgattctcagtctacaaattaaggtatgcaagcaatactaaatctctttattttctagaaatcaattaaatttgactaatctctccaggctcatgagaaaatataatctgagtcattgtcggagcctcccctcccttctcaaggtcatgtcagtgcccagcatattctgcagtgtgaaggtgtctatggagactcgttgttttcgtctgttccacaggtttccacgaacacttccgttgtccatgatcttaagggcttttcaggactgctgacattttgatgcttccaagccacacctaagacaggggactctcttgtaagatggcttaggggtgttgtttgcctagatactgcatgcagctctttctctatgggttcttgttagggaggagaccacccctcatattgtcttatgcccaatttctgcctccaaacaaagaagaagtaaaaactaaaaggcagaaatggaatctacaggcagatagcacagcaccgtgtcctgggcctggtagttaaaaatcaacccctgacctaattgcttgtgttatctatagatttcagacattgtatggaaaagcattgtgaaaatccctgtcctgttctgttccgttctgattaccggtgcatgcagcccccagtcacgtacctactgcttgctcaatcgatcacgaccctctcttgcggacccccttagagttgtaagcccttaaaagagacaggaattgctcactgggggagctcagtttttgagacatgagtcttgctgacgctcccagctgaataaagcccttccttcttttttttttttttctactgtttgcatttttattttattttatttattttatttgtattattattattattattatttttaattatactttaagttttagggtacatatgcacattgtgcaggttagttacatatgtatgcatgtgccatgctggcgcgctgcacccactaactcgtcatctagcattaggtatatctcccagtgctatccctcccccctcccccctccccaccacagtccccagagtgtgatattccccttcctgtgtccatgtgatctcattgttcaattcccacctatgagtgagaatatgcggtgtttggttttttgttcttgcgatagtttactgagaatgatggtttccaatttcatccatgtccctacaaaggacatgaactcatcattttttatggctgcatagtattccatggtgtatatgtgccacattttcttaatccagttgatttaaacgttagacctaaaaccataaaaaccctagaagaaaacctaggcattaccattcaggacataggcgtgggcaaggacttcatgtccaaaacaccaaaagcaatggcaaccaaagccaaaattgacaaatgggatctaattaaactaaagagcttctgcacagcaaaagaaactaccatcagagtgaacaggcaacctaaaacatgggagaaaattttcgcaacctactcatctgacaaagggctaatatccagaatctacaatgaactcaaacaaatttacaagaaaaaaacaaacaaccccatcaaaaagtgggcgagggacatgaacagacacttctcaaaagaagacatttatgcagccaaaaaacacatgaaaaaatgctcatcatcactggccatcagagaaatgcaaatcaaaaccactatgagatatcatctcataccagttagaatggcaatcattaaaaagtcaggaaacaacaggtgctggagaggatgtggagaaataggaacacttttacactgttggtgggactgtaaactagttcaaccattgtggaagtcagtgtggcgattcctcagggatctagaactagaaataccatttgacccagccatcccattactgggtatatacccaaatgactataaatcatgctgctataaagacacatgcacacgtatgtttattgcggcattattcacaatagcaaagacttggaaccaacccaaaagcccttccttctttaactcagtgtctgaggggttttgtctgtggctcgtcctgctacacttgcagcatcttttcttgtctattccaaggcctcccttcatctccacttctggtgcaggaaccttttttctactctaggaagccttctattcctccagttatcctttttgtttcttctaacaaggctcccatttttttcttctttattgtaaacgctctaagttctactgtgagctcaggcttctggaaacaaaacccagaacttctctttttttgagatggagtttcattcttgttgcccaggctggagtgcaaccacacaaccttggctcactgcaacctctgcctcccaggttcaagtgattatcctgcctcagcctcctgagtagctgggattacagccatgcgccaccacgcctggctaattttatatttttagtagagatggggtttctccatgttggtcaggctggtctcacactcctgacatcaggtgatccgccaaccttggcctctcaaagtgctgggattacaggcatgagccactgtgcctggcccaaaacccagaacttcgtggagttatttctgctttctgtgctaccaaataatttccttgagcccatatgaaacacagccagctccaagtttgagtgagagaaacatacagaaaagaaaaaaaaatacaatttagtgaccccaaatttcatttttttctcatttttataccatctttactagtgattctcagttctaatttccaaatatacacagaaagatggtttggggctgttgcaaaaattctctaaaactttcaagatcaagttaatgctggagaaatttaaaattctaaaataaataatggttcttgttaaagctcggagatttaagaggttagaaaagtacttctcccattctaacaatgagaaaaaaaaaactaaactacaaaattaacaacttttttgaacctatgagagaacttatgttataggcaaataactttcttaaaaccaagagaaagacaagggcctgcagggagaaacagtattcaagcatacacttacctagaacagatactgccaaatgcataaaaaactggtaagaagcttatgctagaaatgtttaaagaattgctaaaggccaagtgtgagctagtatcagaggcatttgaaccggagcaactccaaggggctgggtaaaataaggctgagacctactgggctgtgttcccagatggttaggcattctaagtcacaggatgagataggaggtctgcacaagatacggatcataaagactttgctgataaaacagattgcagtaaagaagccggctaaaacccaccaaaaccaagatggccacgaagagtaacctctggttgtcctcactgacacactttcaccagcaccatgacagtttacaaatgccatgacaacctcaggaagttaccctatattgtctaaaaaggggaggcatgaataacccacctcttgtttagcatatcatcaagaaccataaaaatgggcaaccagcagccctcggggctgctctgtctatggagtagccattcttttatgcctctactttcttaataaactgctttcactttactgtatggacttgccctaaattctttcttgcacaagatccaagaaccctttctcagggtgtggatcaggaccagtttccggtaacactagcatgagagtgtgaagtcccaggggctgcagacacagagggttcacactgtcttacagtttttccctccaagaacaataggagctcacagggtagatcaaggagaagcctcagaaaatgtcctccaagatgctggctggagaaggggaatagcagccactgcccaaacaccaccctgatacattcccttcatcttccctacccaacaaagctttaatctgcaaagggaagttggtcaaaactgtaccactggaaactgactgcagctaggagaggagaatacgagggaaaagaagcttcactttgggggcagggcaggaatatttgctaggccagcactacagctggaaaagttgcaggagccactgagacccaggttttcagtttctgctaagactgatgcttcgtaagaatataagaggtcgcccctctccctctctctgccaccatgctaacaagagttgcatcagaatatagtttggagaactacttacagactctctccggaggatagtgcaaaggggagactcaaaaccaagagaagagacagaaacaatatatcactaggggagtttaaagcttctggacccctgagggtaaccatagcaataacaaacttccagtccaactctggactaaattaacacaaattcccacattaaaagtctagcagaaggaaaggcatgctcagttccaagcataaaaatatttacatagtatctactgccctgtataacatatttaccattcatcaaaaaatcccatggtacacaaaaaggcaagaaaaaacacagtatggaaaactgtgtttcccaaagtaatcaacagaaccagcctcataaacatgttggatttatcagacagggaattttaaataactatgacaaatatgttaaagactaatggaaaaggtggacaacatgcaagatcagatagataagttcaacagagagatagaaacaacaagaaagaatcaactaaaaatgctagacatcaaaaacacagtagaagatatgaagactgtctttcatgggcttaccagtagacttgatatagtcaaggaaataattaatgaagtggaatataggtcaataaaatttactcaaactgaaacagaaggagaacagagtggaaaaaaataggacaaaatctccaagagctatgggacaatattagacagtctaacatatacataatttgaaatcccagaatgagaagaaagaatgggtagaagaaatgtttaagaaataattgctggcaattttctaattactgacagacattcttatgttctgaatgtatccccctcagattcatgtgttaaaaactcaatccctaatgcaacaatgtcttagagatgggtcttaatgggaggtgtttagattatgagggctctgcccttgtgaaaggataaatgctgctataaaaagggcttgcaggagtaggtttgctcccttccacctcctgccatgtgaggatgcagcaaggagctctagctagcatctggctcaccagatgctagcaccttgatcttggacttgccaacctctagaactgtgagaaataaatgtctgtttctttaaaataaattgtctagtctgtggtattttgttatagtagtctaaaacagactatgacagaaattggtacgagaggagtgaggtgttgctgtaataaatacctacaaatgtggaagcaactttgtaactgggtgatgggtagaggctgaaacagttttggagtgaatgctggaaaaagcctatattgccgtgagaatacattaagagcattgagggtgattctggtgagagctctgaagaagaacagaggtgtaggaaaagccccagtcttcttagagattactcaagtggtcatgaacggaatgctggtagaagtatggacagtgaaggacattctgatgaggttgtagatgaaaatgaggaacaaacattggaaactggaggaaaggccacccatgttacaaagtagcaaagaacttagctgaattatgttcatgtcctaggattttatggaaaaggcagaacttaaatgtgatgaactaggatatttggcagaagaaatctcgaagctgagaagtattttaggatgctaagtggcttctcttaattgcttatagtaaaatgtgagaagagagaaacaatttaaagatggaatttacaattaaaggaaaagcagaacataaacattcagaaaatctcagtctgccacgtaaagaataagaaaacatgtttaggaaagaaaatcatgggtgtggccaagtgaccatttgataaggaaattagtagggatagaaggaatccaggtgctattcatcaagacaacaagagaatggccccgaaggcattttggagatctttagaggccgccatgcccaccacaggcccagagtgctaggcctagaaatatcatcagagtgaccagatgaaaggaaataatatagaacataaataaatgaaattgaaaataggaaaacaatacataaaatcaatgaaaccaaaagctgattgatatagtttggatgtttgtccccttcaaatctcatgttaaaatgtgattcccagtgttgaaggtggggcttggtgggaggtggttgggtcataggggcagatacctcatgaatagcttggtgccctccccacagtaatgagttcacatgagatcttgttgtttagaaaggagcctggcatttcctcctccctctcttttttgctcctgctctaagtgacatgtgtgctccaccttcaccttccaccatgagtaaaaacttcctcaccagaagccaagcagatgctggtgccatgcttgtacagcctgcagaatagtgagccaaataatctcttttctttagaaattacccagcctcatgtattcctttatagcaattcaaatggactaatacactgattcttagataaagtcataaatttgataagtcactggttaagctggccaagaaaaagagagtgaagacacaatttctcaacatcaggaatgcaacaaaggacatcactactgatctcacagacattaaaaatataagagaatagtacagacaacactatatccataagttcaacaatttagataaaatgaaacaattattttaaagagccaaactaccacaactcacttaagaaagatacctaacctgaatactccaatatttattaagaaattgaaactatagttttgaaacttctaaaaaggaaactcctagcctagatggtttcgctgataaaatctacaaaacacttaagcaagaaataatcccaattctacataatatcttccagaatatagaacatttatgaattcatctggtgaggtaagcattaccctaagactcaaaccagcttgcacattgcaagaaaagaaaactatagcccaagatacgtcatgaaaataaatgcaaaaaatgctcaacaaaatattagcaaatcaaacattgcaatatattaaaagaatagtatataaccaattggggtttatagcagatcccaggaaagaaaatcaggcttacatttaaaaaatcaatcaatgtaattcattatattatatacattcatctcaatagaaacaaaaacaaaatcaatgaaattcaacatccattcatgacaaaagtctcagaaaactaggaatagaagagaacttctttaactttatataggaaagctatgaaatacctacaactagcatcatacttaagagtaaaatactgaatgttttaccctccaaaactgggaataaagcgaggatgtcctctctgactatccccaatcaacaccagactggaagtcatagccagtgaaataagccaagaaaaacaaataaatagcatacagctttgaaaggaaaaagataagcctgtctttaattgaagatgacatggttatcaatgtagacaattccaaaaatatacaaaacactccgagaactcataagtacatttaaaaaggtcaatatacaaaaaccaatcatattcctatattccagaaatgaatagttgtcatttgatattaagaaacaagatcatttacaattgcactgaaaaagttaagtacttaggtataagtctattaaaacatgtgcatggtctatatgttgaaaatgacactgatgaaaggtattaaagaaaaatctaaacacattgacagatacactgtgttcatgatttggaagcattaatattattaagaggccagttctccccagtttgatctgtagattccatgaaatcccaatcaaaatccagtaagctttttatagatgatgacaagctaatttttaaacttatatagaaaggcaaaggacctagaatagccaaagcaatgctgaaaaagaaaaaaaaaagttggaggattcatgctaggatttcaagacttattcaaaacctatactaatcaagacagtattgaataagctaaaggacagacacatggagcaatggaacagaaaagagaattcataaatagatctacagaaatattgtcagctgatttttaacaaaggtgccaagacaatgcaatggacataggatagtttttcagaaaatgatgccagaatagtccatttgcaaaaaatgaatctccctgtaccttaaacaaaaattaactaaaaatggataataaacctaaatgcaaaacataaaactataaaatgtctaaaagaaaacatagaaaatttgtgtgatcttgggtttggcaatgggttgttagatacaacaataaaagcacaatccataaaagaaaaaaactgataaatttgactttatcaaaatttaaatctttgctttgccaaagatgcagttgagaaaataaaaagactggcacagaggcaaggcacagactggggaaaaaattgcaaatcacatatctgacaaagactcgtttccagagtgtatatataatatgtctctctctatataatgacatgttaaaactcagtaataagaaacaacccaatcttacaaacgggcaaaatatctgaacagatatttctttaagaagatatcaatagcaaataaatataaaagaggtgttcagcatcatttgttatcagaaaaatgtaaatgaaaaccataatgtgatagcactacacacctatcagaatttctggaatagagaaaaacgtggcagtatggtgagatgcaaagcaacaggaactctcattcattgctgttgagcatactaaatagcacaaccaggttggaggacaatttggaaatttcttataaagttaaacatatacttaccacatgatccagaaatcccaatccaaggcatttatccaaatgagttgaaaactaatgttcatacaaaaattcatataaaaatgtgtataacaactttattcacagtcattccaaacgagaaacagctgcaatgtccttcagtaggtaatggaataaggaactgtgatatatccgtacagtaggctattgctcaacaataaaaatgaatgcattatcgatttacacaacaacacggatcttaaatgcattctgtaagtgaaacaagccagacccaaaaggctacatattatatgatttcatttttatgacatcgtgtaaaaggcacaactatagggatagaaaacaggtcagtggttcagtggttagcagggttgagggaaacgggagaggttttctacaaagggactggatgagaagtaatttttagcatgatgaaacggttctatacattacttgggcaggtggatacatggctctatgcattttcaaaccccatagaacagtagtctacaaagagtgaactttactgtatgcaaattgaaaaaaaaatcaacgaggatgtttagggggagatcccaataggcaacacagaaaaaagttatttgctgagcagcaacttttaaaggtgccagagagttaaaacaaaagaaaacaaaacaaaaaaacaaaacagcaataaatatagtggcatgacttcaaaaaagttcatttataatttcttcacttgtgtccactgtggtgaattctgtcaatgtgagctcctgaaaagcaaggcctgtgtttgtctccctctgtaggcccacgctttacagtacagcatttctcaaatgagttataggcagacccccccccctacactgttagggagaaaacaaacctcccgtggacttctaatgctaaagtcttttattatcttgttttaaacatatgtttaaacatacaaatatataaatgcttgtgtttacaattcttatacacctaggagaccataacaaaattatgaattagacacaaagaactggagccccagtaaagctcaatctgataacattcattggtgaaactcaatcactgctcacaatgtgactctgctcctgaggcctgtggtctagtcttggaagtgggcagccatgataaatgttggaactcaaatgtttccacctttattctctcttctaatgattacacaaacatcattttcacagcaaaccttgatgttgtataggatggcttgaagaagttgaaaatcacttcctacatcagcaccatcaaaactactactagaccttgttatgattttcctgttcccacctgcatctaacctgtgataaacaaaatttagtttatgttaaatttggcccttgtcctctaaggagtgttaagtgtgaagccatcacagtgttgctgatgaacagaatttacctctgttcgaagagcgaggactctgtgattatgtgggaaggctctgctgtctttgtcttcagtctttgcctgctttagcaaattctgataggaggaagatgcaaacaccactctcaggtgggatttcaaaatcctgcaccatcaaactgatctgttttgaactatatggagctctctaaggttacaataattctttctactgtgctttcaatactgaaaaaaaaaatcacttattagtggacaattcaacaagcaatttaaatagaaattatttttaaaaacatgcttgacacatagccagacatagtggcacatggctgtagtcctagctacttgggaggctggggcttgatcccaggaggtaaagggcagcttggataacatagcgagaccctgtttcaaacaaaacaaatgttttgtttgaaatgcttgacaactaattatgttgattacctatgatttggagaaatccatgctataacaatgaatagtcaagcgttcactctggagtaatccaacactttgctgtattccatatgaaaataaaacatgcctttgaatttttacaaggatgcagccagcttttgtttgaatctgtgaaatggcaagtttggggctggactaggactgtatcagggaaagaagctgtttggcatgttttttttttctgtagtgttgagcattgctgcttgttgggcagctcaaaggacaagatattcaaagatctccctgccagcaggtgcctccaacgccacacttgagaagtggatatgcgtgagccaagtcctggcagccacactcaccagccacgtagtccttggggacatcaccagactcctcgtgcttctgcttcctcaccagtaatgagttttaaatgggaagatgcagggaacatgctgagaagaaagcttagcacacaggacatgctctatcatgttagctcttcttactgacacacttaacacattggattacagtcacccatctcctatttttgctttaaacctaactggtctatcagttcttgaggagcagggaccacaacttattcctctctgaatccacagtcctgagcatacaacactcagtgttttgaactgaagaaagggaatagaattggaaaattgttcaaaaaagagcaaattgatgaacacaaccaagcaagggacaaaaatgagtaattttcacctcagagtgtaggataataatttctgtgtgccaccttcgagtcgacctctgtgcccaacattttttcacctcaatgcatttaacaaattattcctcacagttcatttgggtacactactggctgcaatcctgtaattacaagttgttttttctgcttcaaaattgacctgaatgctaataagcaaaaccaactaaaaaaattcttaccctgaagttctggaaatggttttgatctgggtgttggatacatattacgtatctgtactcttataatttgcacactttattgtatgtatgttatacccagttaaacattttttaaagccttttgcctatcaagagtgattccatctgacacatgtctacaagactgtcactgccaccctggctatcccttccttggcatctcccaacctactgctcccaaaaatgtcctgtatctacttagcttataatcacaggaaatctgtatgcactttgaacagcaaagccctcaaggcttcaaaaagttgaagcttttgcagaaccagaaaaaacaatcctaaaattcatatggaaccaaaaagagcccacatagccaaagcaagactaagcaaaaacaacaaatctgaaggcatcacattacccaacttcaaactatactataaggccacagtcaccaaaacagcatcgtattggtataaaaatacgcacatagaccagaggaacagaatagagaacccagaaataaacccaaatacttacagccagctgatctttgacaaagcaagcaaaaacataaattgggaaaaggacaccctattcaacaaatcgtgctgggataattggcaggccacatgtcggagaatgaaactggatccttgtctctcaccttatacaaaaatcgactcaaggtggctcaaagacttaaatctaagacctgaaaccataaagattctagatgataacattggaaaaaccctattagacatttgcttaggcaaagacttcatgaccaagaacccaaaagcaaatgcaacaaaaacaaaaacaaatagatggaacttaattaaactaaaaagcttctgcatagctaaagaaataagcagaagagttaacagacaatccttagagtgggagaaaatattcgcaaaaatacatctgacaaaggactaatatccagaattgacaaataactcaaacaaatcagcaagaaaaaaacaaacaatcccatcaaaaagtgggctaaggacatgaatagactattctcaaaagaagatatacaaatggccaacaagcatatggaaaaatgctcaatatcactaattatcagggaaatggaaatcaaaaccgcaatgcaataccacctcgctcctgcaagtatggccgtaatcaaaaaataaaaaaataatagatgctggcatggatgtggtgaaaaggaaaacttttacactgctgggaactgggaatgtaaactagtacagccactgtggaaaacagtgtggagtttccttaaagagctaaaagtagatctaccatttgatccagcaatcccactactacgtatctacccagaggaaaagaagtcattatacaaagataatacttgcacacgcatgtttatagcagcacaatttgcaattgcaaaaatatgaaaccagcccaaatgcccatcagtcaatgagtggctaaagaaagtgtggtatatgtatatatataccatttactcagtcataaaaagaaataatggcatttgcagcaacctgtatggaattggagaatattattctaagtgaagtaactcaggagtggaaaaacaaacatcctatgttctcactcatatgtgggagctaagctatgaagatacaaatcttcatatgatatgttggactttgcggacttgggagaaagactacacattgggtacagtgtacacggctggggtgctgggtgcaccaaaatctcagaaatcaccactaaataacttttcatgtaaccaaacaccacttgttcccccaaagacctactgaaataaaaaaattaaaaattaaaaaacaaaaaatgctgaagctttttgttaaagagcacttaaaattaaggttcccataatttatccaccagagggagccaacaaagccacaataataggaacatactgaccttagtgagctacaaatcaagattttcagacaagggctgcagagttgagacataagcaagtatcaattgcttggttcaaggaaggcatgtgaaaatttattgaagtcagatttaattcatggctttgttttctcaatagtagacatgttttaatagtaagagtcaaatgactttgaaagttttaacactaataaatgccttgtgaggatatggacatgaaagtaagaatagctcacctttaaaaaacactttacagattctgaataattttcagttagagagttgagtgctggcagttctcttcattaatacaagaatttaatagataaatacagtttgtgcccattgggatgaaaaaaacagtttttattgcatcaatgcagcgtacggctggtatatatgcaaattaggaaaaggcatacctgggaggtttagggcatggtttggtgagcagagcatgggatggatttcagaccccactttcccttattaggcagctctgtgcaaggctaacatccatatgtggcagccctcaagtctgggcaatggtggctccaaggggatgcttggaagagtttttaatctttcctttctccaattctttgataaggacaatagcattttcttaatctaatataaaatgcatttccaagactagttgcccacctctcttctgccaatcagaatgttgacccaggttcttcctgtagaaaaattctggattcaccactgaactatgaaaataaacattttccatcctgttctcctctgcttccaatccaccctgctggaaaagagttgcccatagttcccaagtggcctttttctttatagttttcatttcctgatcactccccacttccttattttgtagccactatctatcttcatcagattttctcgctggttagaaactgaaaccagacatccatttaaacatcttacatgggatcatccctcagtccttaccttatttgatctgaccacttaacactgttgatcactctgtcctttggagataatttccccatttggcttctagaacatgagtcttttgcttcttccccttccaaattggctgctgcttctcagtctcctggtttgattcctccttatcttcctgatttctaagtgtggacagctacaaggcatctgtcctgtggctttacacaccttcacagctctcaagtttatatctcccctagcttctatcctaaactccagactcatcttcacctgctcactgaacatttccatttggattttgtattatctgttctcacactgcttaaagaaacatctgagactgggtaatttctaaagaacagaggtttaattggcccacagtttctcaggttgtacaggaagcatggcagcatctactcctggggtagcctcagggagcttttactcatggtggaaggcaaagctggagcaggcatcttacatggcaggagcaggaggaagagagagatggggaggtgccgcacactttagaatgcctagatctcttgaaaactcttatcatgtgaacagcactagtgggatggtgctaaaccattagaaaccgcccccgtgatccaaccgcctgctaccaggccccacctccagcactggggattacatttcaacatgagatttgggtggtgacacagatccaaaccatatcagatgtttaaaagcatctcatacgagacatgcctaaaatcaaactcttaagtttctccttctatgtgtttcatagtctttctcacctaagctaatgatacctccctttttagttgctcatgccaaaaactctggagtcatcttttttttttttttttttttttttttttttgagacggagtattgctctgtcacccaggctggagtgcagagtgcaatggcatgatctcagctcactgcaacctctgcctcctgggttcaagctattctcctgactcagcctccttagtagctgagactacaggcatgtgccaccatgcccagctaatttttgtatttttagtagagacgggttttcaccatgttggccgggatggtttcgatctcctgacctcttgaactgcctgcctcagcgtctcaaagtgctgggattacaggcataagccaccgcgcccggcctggagtcatctttgactgatctttctcttactctccatattggcaaatgcctttggatccagatttgaaatctgtccaggatttgactactttataccacctcaacagcgaccactcaagtccagatcacagcatcatctcttgcctggattactgcaatagtcttctaaactcacttccctgactctgccttcccctacccctcaccctttaaccagtgtctattttcttcactacagtcagagtcatcctgctataaccagaagcctctcctctgcataacgtatcccatctcacagagtgaaacccaaggaacttaaaagggcctgtgaggctctacatggtcagtccctgatatatttccaaacagcactcaaacctccctgttctaacaccttctttgtgcatgccaaacctgttcatgccacctcaaggtctttgcacttgctgatctttctgccagcgttcttccttcagatgccctcgggctggctccttcaactcctttagtctctgctccaatgtcattgcatcagccaggccttcctgacaccgtatataaaataacacccacactcctatcactctctgtgtgccttaccctgcaattttttcttcatagcacttctctcctctccattggatgtgtgtgtgtttaggtatacatacatgtggtatatatatttgtatatacatataatgtatatatttgaatacacatgtagtatatatatttgtgtatgtatatgtctatctgtttaatcattgtctgccttctccaccaaaaatgtaaactctgtgattagaagtattttgtttcatttatgttataatctcagtgcctggaacaatgcctagcacatggcaggtatttgataaatatttgttgaattaatgttgactgaatctaggtaacttatatactgactaaaagttacatacaatgtgtaaaataaaatgtgttaaactttctgtgttgcccaagcagaactgggagtcttggaaggcatttaaagaaatacagtgtttaccctggaagaacagtggatgccacatgaatatttgatgaatgtggaatgaaatctgacatcttgttgctggagtagatggcttaaagataattggacaaaacaggaagctacaaatccacatcatttaaccccttgttgttatgttgaattaggaaacattatatatactgcattttgtttttaccaattgctgccatattctcttactattattattaatatttttaagagaaagcgttttgctctgtcactgatactggagtgcagtggtgtgatcatagctcactgcagccttgaactcctgggttcaagtgatcctcctacctcagcctcctgagtagctgggactacaggcatgccatcacgcccagctaattaaaaaaatcttttttgtagagatagtgtctcactatgtttcccagactggtctcaaactcccaggctcaagcaatcatcttgccttggtatgtgctaccatgcccagacaaattctattattaaacagaatttctatgtattatctgcctacctaaataagcatattatgaatgtcatgcttcattattgctgatgctgaagaatccagactgatgtcttctaagagaatatccatcagtaaagtcaagaattgtgtttctatttatcactttattgccaaagctaattgcttatgtaaagattcctgtcttgatgtgagctgttagcatattaaagtatatttactgaaattgaatccataatttaaatgacatataatttaaatacacttgtgaaaacaaaaagataaattcatttaaaacagaatataattaagggaaaattttaattaaaaaaacactaatagcgaaactgttttttttcctaatttttattttattgtggtaagagcgcttaatgtgagttctaccgtctgaacaaatttgtaagggtacagtaccatattgttaactacaggcacaattttatgcagccgttctctagaacttattcatcttgcatacctatgactttatacctatggaatagcaattccccaccatttctcttcccctcagccccagtaccattctactctctgattccatgagtttgactattttagacaccccatgggccagacatgatggctcacacctgtaatcccagcactttgagaggccgaagtggctggattgcttgagcccaggagttcaagaccagcctgggcaacatgacaaaaccctgtctcaaaaataaaataaataaaataaaaaacaggaaatcttgcaatatgcaacaacacggatgaatcttgaagacattatacaaagtgattatttcacttggtatgtgtgtatgtttaggtatatatacatgtaagaaatctagaatttcctaatatttcctttttacatctttattacatctttgattttcatctttaaaatgaacatgtagaggtaaaaacacaatatgcatattaatcagattgtgtattttaatgcctatgtgttatagaagccgccactgttgtgagagtgtgggcttgggacctggactgcctgggcatggatcccagctctgccacttcctggctgtgggtcatgagcaagccattttgtcctcatgtttctgtttccttagagagttgttgtgaggataatgagatgatagaggtaaaacactgagaatagttctgaacaaagagtagtcactcaataaatactagctattgctattagctatatataatgaaaataaagttttaccatcacattctccttttgtagctaatgggttgaattaatccaatttgcactaatttgtcaaaaatatccaaatagtttcgcatgaaattactcccaaagaaagagaaccttttataccaaagaggaacgcttgcaccttctttagagatgccagtttctctccgggaatctcctgattgcatacactccagatgtcataattggtactgagagctcttagagatatttccctggttattgttcatacaaagctctgagaaagcccatagcaaacactggcttccagtgttcttcattattgatattgatattttgagatcatgacaaagggagtgtgagaatgatgattaatttactaattttcctcattttatgctttcttcagctctgtaaccccaataccgattagcatgcacacacacaaacatacacacacatttatatctcactgcccacttaaaaaatgagatttattatatattcatattgacctcagtgtttatgcttttgagtcctgttttagggaagattgtttcaataataaagatgtgcattcttatcttgacctcctttgatgcaggtgtattctggccctcttgattctatgatacatggtacactagtcttccgttgaatttgaattgtaaagtagttacaatttaatacacttataaataatgtatttattcatactatgtagagacagggacaccatggataatttttttctctgaattgtattttttaatcttattttaaagttggtataaaattcacataatataaacttagccattataaagtacacaattcagtggcatttagtgatattcccaaagtgatgcaaccaccacttttcactaatttcaaaactttttcatcaccccagaaacacaccccatagccattaagtaatcactgcccattctcctcttctctcatcccctgacaaccatcgacctgctttctgtctctacggacttgccttttccagatatatcatgtaaaagggatcataaaatatgtggccttttgtgcctggcttcctttatttagcatactgtttttgaggtttatctaagttttagcacgtatcagtactttgttcttatttactgctgaatgatattccattgaatgtacgtatcacaatttatttatccatttctccattgatgggcatttgggttttttctaccttttggctactataaataatgctgctataaatcttcatgcacaagtttctgtgtggacatatgttctcatttctcttgggcatatatgtatgagtgcaattgctaggtcatatgataactctatgtttaactttttgaggaactgccaaattattttccacagtggccacatcattttacattcccaccagcaatatacaaatgtttctatttctccatatcttcaccaatgcttaattcccattttgttttgttttcattttaaattaaagccatcctagtgggtataaagtggtagcttattgtggttttgatttgcatttccttcattaccaaagatgttgaatatcctttcatgtgcttattgaccatttgcatatcttctttggggaaatgtctatttaaattccttgtgcatttttaaaaattgtgttgtctttttgttattgagttgtgagagttgtttatatatgctgaatattaaacccttagcagatatgtgatttgcaaatattttttcccattctgtacattggcttttcacattctcgataatgtcttttgatgcacaaaagtttttaatttttatgaagtccaatttatctattttttcttttgttgcttgtgcttttagtgtcaatctaagaatcctgtggcaaatccaagttgatccacaaattcataaggaactgcaagggactctaaatacactgagcaatactgaaaaagaaaaataaagttggagtactcacacttccctaaattcaaaatttaccacaaagctacagtaatcaaaacagtgtggtactggcataaaagtagatatatagcccaatggactagaaatgagattccagaaataaacccaaacatctatggccaattgaattacaacaagaatactaagataattaaatgtagagacaagaatcaaatagacgcaataaaaaatgataaaggggatatcaccaccgatcccacagaaatacaaactaccatcagagaatactataaacacctctatgcaaataaactagaaaacctggaagaaatggataaattcctcaacacacacaccctcccaaggctaaaccaggaagaagtagaatctctgaatagaccaataacaggctctgaaattgagacaaataatagcttaccaaccaaaaaaagtccgggaccagacggattcacagctgaattctaccagaggtacaaggaggagctggtaccattccttctgaaactattccaatcaacagaaaaagagggaatcctccctaactcattttatgaggccagcatcatcctcataccaaagcctggcagagacacaacaaaaaaagagaattttagaccaatatccctgatgaacatcgatgcaaaaatcctcaataaaatactgccaaactgaatccagcagcacatcaaaaagcttatccaccatgatcaagtgggcttcatccctgggatgcaaggctggttcaatatacgcaaatcaataaatgtaatccatcatataaacagaaccaaagacaaaaaccacatgattatctcaatagatgcagaaaaggccttcaacaaaattcaacagcccttcatgctaaaaactctcaataaattaggtattgatgggacgtatctcaaaataataagagctatttatgacaaacccacaaccaatatcatactgaatgggcaaaaactggaagaattccctttgaaacctggcacaagacagggatgccctctgtcaccattgctattcaacatagtgttgtaagttctggccagggcaatcaggcaagagaaagaaataaagggtattcaatcaggaaaagaggaagtcaaattgtccctgtttgcagatgacatgattgtatatttagaaaaccccatcgtctcagcccaaaatctccttaagctgataagcaacttcagcaaagtctcaggatacaaaatcaatgtgaaaaaatcacaagcattcctatacaccaataacagacaaacagagagccaaatcatgagtgaactcccattcacaattgcttcaaagagaataaaatacctaggaatccaacttacaagggatatgaaggacctcttcaaggagaactacaaaccactgctcaatgaaataaaagaggatacaaacaaatggaagaacattccatgctcatgcgtaggaagaatcaatattgtgaaaatggccatactgcccaaggtaatttatagattcaatgccatccccatcaagctaccaatgactttcttcacagaattggaaaaaactactttaaagttcatatggaactgaaaaagagcacacattgccaagtcaatcctaagccaaaagaacaacgctggaggcatcatgctacctgacttcaaactatactacaaggctacagtaaccaaaacagcatggtactggtaccaaaacagagatatagaccaatggaacagaacagacccctcagaaataatgccacatatctacaactatctgatctttgacaaacctgagaaaaacaagcaatggggaaaggattccctatttaataaatggtgctgggaaaactggctagccatatgtagaaagctgaaactggatcccttccttacaccttacacaaaaattaattcaagatggattaaagacttaaatgttggacgtaaaaccataaaaaccctagaagaaaacctaggcattaccattcaggacataggcatgggcaaggacttcatgactaaaacaccaaaagcaatggcaactaaagccaaaattgacaaatgggatctaattaaactaaagagcttctgcacagcaaaagaaactaccaccagagtgaacaggcaacctacggaatgggagaacatttttgcaatctactcatctgacaaagggctaatatccagaatctacaatgaactcaaacaaatttacaagaaaaaaacaaacaaccccatcaacaagtgggcaaaggatatgaacagacacttctcaaaagaagacatttatgcagccaaaagacacatgaaaaaatgctcaccatcactggccatcagagaaatgcaaatcaaaaccacaatgagataccatctcacaccagttagaatggcgatcattaaaaagtcagggaacgacaggtgctggagaggatgtggagaaataggaacacttttacactgttggtgggactgcaaactagttcaaccattgtggaagacagtgtggcgattcctcagggatctagaactagaaataccatttgacccagccatcccattactgggtatatacccaaaggattacaaatcatgctgctataaagacacatgcacacatatgtttattgcagcactattcacaatggtaaagacttggaaccaacccaaatgtccaacaatgatagactggattaagaaaatgtggcacatatacaccatggaatactatgcagccataaaaatgatgagttcatgtcctttgtagggacatggatgaagcgggaaaccatcattctcagcaaactatcgcaaggacaaaaaaccaaacacctcatgttgtcactcataggtgggaattgaacaatgagaacacatggacacagaaagggcaacatcacacaccagggcctgttgtggggtggggggatgggggaggaatagcattaggagatataactaatgttaaatgatgagttaatgggttcagcacaccaacatggcacatgttatatacatgttgtatatatatgtaacaaacctgcacgtggtacacatgtaccctaaaacttaaagtataataaaaaaaaaagaaaagaaaatgtggtgaaaatacaaattttcttcaacaaataaattttgggcaactggatatccgaatgtaaaagaatgaagctgcatccctacctctcactccatatataaaaattaatgcaaaagaaatcaatagcctaagtataggagctaaaactatacaactagtagaagaaaacaaaagggaaaatattcaccatggataatttaaatccacagataattctctacctcagttaaaagtgagcctcttttccattataacttttgctcagtgaatatggggatgatagcaatgctgcctaactttttttttttttttttttttttttagagggatagtctcgctctgttgcccaggctggagtgcagtggcgagatctcagctcactgcaacctccacctcccgggttcaagcaattctcctgcctcagcctcctgagtagctgggattacaggcgtgtgccactatgcctggctaatattttgtattttttttttagtagagacagggtttcaccatgctggccaggctggtctcgaactcctgaccttgtgatccacccgcctcggcctcccaaagtgctgggattacaggcatgagcccagccgagttttctttcttttcattcccccatccattaggatagacatttcataagaaatatccttgaagaatatcagaaaaaaggcaaagaatcaagtgcttagtcaatcctatcaaaacataaagttggttgtaaataataaaaacaaaaccaagtgtatgcattaaagcaaatacaccctttggtttataaattcttttattaagtcaattaactcttctcttgcatgccctccctcacatgataattttattatgagtagataatagaatggttaagagcacagaccctacagccagagggcaagaagtccaatcttagctccaccacttgcttagctgcataacattctgtcactttttaaactctctacatgcctcagctccctcatctttaaaatgggaataatattagtgcctacctgtaggactgttgcctagcacatagtaggcattttaaaagtgtgtgtcattatttctaggactgacagaaaatggatcagccaagagaggaatttttatgcttcctaaaatactggtccatgattatatacagagttgctagaaaaagcagctcatgtggttgccctgagcctgtaccctgtagacctccaactacagggagtgtaactaatcaaggacctcagctactgtgctctgaaatccataactacatttgtacagaggtctcactttctgccagctgctcccagccagtaactaagtgctgtgtgaaaactaagggaggtcatttctgggagacatgggactcctcttatggtcaactttggctcaagtattctttgacatctttgtcaaaatttctttattctgatgatcaagctggaccttccattccactttgtcttcacttcacttcactttgtcagacttgcatcatgggctaatgtccctccaacctttctgcctccctccctattttatctcatctttttaatcccatcttggtgtctgattcttagaggacttgaactaacacaatctagcattcaaaccactcttagatatgacatcctattttccaccatatctcccacctcttatttacctgtatctcatactcttggtttctgcatgtgcccaataccttcctgtctctgagcttttgcccatactccttcactgagaaagcactcactacctgaccaattttgcctgttgaatcccacttttcattgatcatgcatctcaaatgtccccttctctaagcctttcagggtcctgtcagctgcatatatttttttcccttctgtaaacctccaggattcttgtttttgaacacttttataagcttattaatagcaaataaataaaccttttattttgaacctccaaagtgctcagcttgtatagaataggcacttaatatttgcagaatataattgaaaaattgggggaattctattctagtgaatttaatttttaaaattcaggatttccaacagctcacatccattctgcttgatatagtaacaatgaacttgcctgaataaaaaaaatattatatgtatcaaagcacagtgcagaatgtagcatgtagtaacaattttaatatctgcttaaaatgcttcatcaaatttggctatttttttccgcaaaggagtgattatttgaaattctaaaatagttttgctttgtgtctgtatacaaatgtgaactagggcacctggataaatagttgtaaagaaatacttcctcctcaaacaaagggtccctgcctaagggctaatgaagccaacatctctcctcttgggctcaactccagaaacagaaaagggagaccttgctgtttcaatgaacttttacaggatgaggtgtctgaacagtaatatgagagtgtattgatgagctcaatatataatcttatttcttcatgtatcttatttcttcatatatatttcttcttatttcttcaaatatttcttcatatatttctacatatatgtatggcatatatgtatggcatatatgtacatgtatgaatcttatttcttcatacatgtaccaggcagtttccatttaatcctcacaacagacttatcctcatattacagatagaacattgaggctctgagggtttgtgacttacccccaggtcatgctctggtcattgataaatccttgagaagtttaccgtgggtatctaaaagatatgttaatcatataaagtcaatttcttcccccaaccttatccttacgctttttggacaatttccttgagcaattcagcctaaggaaacttgaaggcagggtttggcatctagccagggtacagcagccgtgccagcacagcagcctccggtcaagggttgtaagtcattaacttgggtctcctaccacttccggttaagaatgcaacactcaggtgagaacttctcaggtggaaagcaggaagagggtggctagtgcaaggatcagatagcacctgcttggaagttcactgattaatgatttaacaagggcggtcacatgggacaactgctgcttttctctgccctcatttttcttactaacaggtctgaaaattgaacaagatggacgggtccaggaaagaggaggaggaagacagcacattcaccaacatttctcttgcagatgacataggtaaggaaaaaatggataacttctcaaacatacattcaacaacagctcagttttttaaaaatataacttttattattttcagtataatgataaagcatactcattgtagaaaacttgaaaaaatatagttacaaaaacaggttttaattaagagctgtttttctttttccttttaaattaagtgataattttaaagttgctgtcattatataacatgtactttttaaaataaataaaaacaaaatatttcctaaaagttcaggaaacatgatgtcaaagttgctacgaaaacaacctataatatcgccacattttgttcaattatagtcagtttcttttctatcttgtaaaataattgtatcattactgaaaactgaactagactatgctgcaattagctttaaggattattgcagaaaatgtctgatttttaaggctaaagtttgctgaattcaacatgagagaaggaaccaagtgggagagcagttctaaaatgctgatggaaaggataaccatggttcattcaacatcttggaaaaaatagacagtgctgaattgcacaatgttaactggaaacacttcaaacctacaagcacccaagtccttgggtgtgtgtggggtgtgtgtgcgtgtggtggttgttgctttctatccaagttcctttagcgcaatcatagtatgaagccagcaagactgcagctaagcaatgggggttactaattttgattaacagagagcaagagcatgaatatttaacatcaattgctctttcatacagccacgcttctccactttctccctaaatgcttagattcaaaaagcgtctttctaaagtgcagccagacaattaacacaaaccaccagccagacctaagcttccctcctggcactgcataaacatgctggggtctttggaaatcaaagaggagtattttcagtctttataaggggaggaaaggtacgaggtactgggctgttgaagaaatgggataccgctgtccttaacatgctcccaccagggtgttttagaaagcagacagagctgcagaaggcagtgaaggaaacaaagacaggggaaacccatgtttcttagcttcgggaggcgagatgagcatgcgcatggggagccctatatgctgtgggaggatgcagttcgtagagaaagcttgcttgcttagaatgtgactcagcccagaatttttttctgcatgggctgagcctgaaagtggggactgttggtggtgccaggcctttctacagcgactctctgacgcacctcatcacaccccttcaactctcccctccacgtctcatcttctgccactttcacacttccagtggaggaaagagcaagagggcaggaaatttaagttcaggtgtccagtccactgttggcactggttttgagaagggctgcataggagctgcttgctaatggagcctggacgtgtgggcatgggcgctgaagaactaggaaagagtgagcaacgctctctggttggtagtgagagtgccggcaaccacacgagaggaccaacgtccccttgctcccaattgccgcctccttctcctttgttagactgagtcacaaaatctcagtgcacaaaaggcctttggagctggtccagcataataaccagtggtggactcaggaactagtattaatttctgctgtttccatatttcaaaatggtaaatggaaattgttcatatatttgtgatgaaaatgtgccagttaacaaagacaccatgtttctttggcttttggagacaattttattcatttgacctggtaacactggttcatctttgttaataaaacgttcttgggctttgataactaaaaataggaaaacaaattattataaaaaaatggagcttgtttagcagacatcattcattcaaattgtggaatccttgcaaaagtaaagcattaaaaaggtatgcttatattaaaagaaagtttagttcaatttcttacttttctttttacaatatacatatatgcatacatatgtgtacacatacatgtgtacatatacatatatatatgtaagggaggcccagagagtctaaatgccttgcccaagagcacagagccaattagaggcagagccagactacctagaaaggaagcatttctcaaactcctatgttcaataaattcatagagtcaatattaaatgcaatagtttcaatacatttactggattccagatacaatgctacgtccttttaacatcttatttcatctttacaacatcatcatgatattatggtcctacattacagatgataaaactgtagctcatatttttttagtaacttgcttaaggcctctccaggaagtgatagagccaaagtcccaatccaagtctcctatggttgcgggcattccatctgagcacccttctcatcttacagtttctgcatggatattgagtggcagtggcggtgtttgttcatgctgggctttttggtagattgttggagctggataccagagaaagccttgcaccttttagggaactctaaaaactgtaaggattataggccctaatgggttggccttggtgattgtccagaaagacatcggctactggatgccagccgagtgcggtattggaagctgctggatacagaggctctcacacaaggaccacttgtttctaattctgaatagaaaggcctcgagtccccggcactgatccctgtgtgactggtcagacctatcgctgtctccttttacctccatcgcctcccccttatactgcttcttttcttattcagaggaaggcgagagaaaggagaaggaagtttctactaactcttgagaaggtttgtttgaggaaaggattgaaggcattaatcaaactttcatttactttgaattttatttatttaagtaattctacttcctggtagtatggagcagtgagaacgggcaatgccagtagttactcaagtcacaagccagttgtgcttcataaatttacttgtacgtgagttgtatggattcagaacaaatgtccccaaagaaacattacaaatgataggattccagacctgtccatgccatctaaccacatggctcccaaactgtgtgccaagatgctccagggcactgcagcaaactcacaggggttctatgagggcatctcaacctctctcagacactgaaaggactactggctggtggtcactcattgtttcacactagattgaactatgtatctttcaatgacatcatctctttcaatcctgggttttctgcaattgctgtgataaaaagcaagttctgtatgaaagtcaattgtagaacagataatgagggcggcagtttgagaaggctggagaagttatgcagtgcccaacaggtgcacacatcccataaataagtgcgttcctttaagaatgaaataaaaatatattttctttcaatttaggtacagtaattttttttaatggctactaggttttttggacataacaatgttaataagatgtttggatctaaacacttaatatatggaactgtttggtgtttatcttggctttggagtactgtgaaaaaattactgagacaccaagggcaccataaactaagatagtttaggaatctatggtctcaactgtactgtagctgaactggccccacttctgggaccttagaggtgggagccatacagtgcaggacaaaagacattagacggcattgatctctccttccttcctatgcttccactcccctggctttgatgccaccgcacggctcaggttcctcttcagcctctttcatctttcatctcaggctcttttgggaacctgtgtcctccagcgtttccctaagactctgtccttggctactgttctctctctggacacacgctctggatgatcctatctactcctagttccattctcaccgcccgttgctatatcccagcgactctaaaacagaaatcgcaaattcaaacaccttcagggccaggcaatgtgtatgtgggaaaggggcaatggtatatcataatttttttcccctacttttctaaaacaagctattgacatttcaattctgtttttagtttatcaagtttttcatcatgcatcttttacatataccagacattactcttactatggtttatttcacaatggcatctcaaggttaattctttcaaggacatgctttgtttgcatgttaaatttatgggaacattcttcatttctcaccattttccttaggagacacagtcctcttggactagatttcattttctactttttttcttatttactaaatacaaataaaaattgtatatgtttatggtttatggtgtacattatatatataatgtagtggaacggccacatatacatatatgtagtggaatagctaaatcaagctaatgaacatataatttacctcacatagttattttttttagtggtgagaacacttaaaatctactctctttgaaatatttaagtatacaatatattgtttttaactatagttgccgtgatgtacaaaagatctcttaaatttattcatcttgtcgaattgaaattttgtatcctttggccaacatctccgcaatatcctcaccctccaacctctgataatcatcattgtactgtctgcttctatgagttccacttttttagattccacatacaagtgagatcacatagtatttgtctttctgcgcctggctaacataatgtcttccaggttcatccatgttgttacaaatggcaagatttccttcttttttaaggctgaattcttccactatatgtatgtgtgtgtgtgagtgtgtgtatatgtatgtatatatatgtgtgtatatatatgtatatatatacgcacacacacacacatcacattttctttattcatctgtcgacagacatttaggttgtttccatatcttggctattgtgaattatgatgcaatgaatacgagcatgcagatatattttcaatattctgatttcaagtcctttggatatataccagtagtgggagtgctggatcatatggtagttccagttttaatgttttgaggaacctccacacttttctatagtagctgtactaatgtacattcccactaacagtgtgcaaagattccctgttctccacatcctggccaactcttatctttcatcttttttataatagccatcctaacagttgggagatgttatctcatggtggttttaatttgcatttctctgatgattagtggtattgagctcattttcatatacccattggccatttgtatgtcttcttttgagaaacatctatttaggctcattacccatttttaaattgggatatttgttttcttgcattttccacttttgactgaagtaagggaacaacatagtttactttcctcttaactctgcagtaagaaaacaacagagcaattgtgatgacagaatgacaaccaacactgagccttgggtccagccaggagggttgagggttgaggctccctggagagcatgtgcccggctcaaaaggcagagctgctttctgcttctggttaactattgtcatggagggacagaaatgcaaataagtggaaactttaagagacactgaatatttcaattttttgtacaatttcctggtttttccatgtttttcacctaatcctagttttaaaaacaatagcatagagatccaaacaaagcacatctgcaggacagatgtgactgcagaggaaactattttcagacttctgttctcaaatcttgtcttcacctctctcctgagtttatgattcataatccaattgcttgcctagatatctcccaggtgtcaaataaacttaccttctccccccaatctattcccactcctatattcataattttaattaatggccccaccatccacacagttacgaaagctagaaatccatatgtcattccttctttctcacaatctgatcaatcaccaattcttgttgacttgaccttggaaatgtttctcaaataaatctggccttctccatccctgccaccacctccctcaccaggtccttattatccccaacacaaaccacagcacctgcctcccaatggtttatcttatttcaaattttatcccttcaaatctaccctccacagtggccacatcactacctccgcctgtagagaacaatcaatgcctcacagcccctgaaggataaagtccgattcacttagcatagcattgaaggtctcccttttcccagctctccctatcttttcagtgtcatttcctgccacaccatttgagctcagtaggagacccttaatgttccctccacacagtgcctagttcatgcctctgcatgctgtgctgcttctcactttggaataacactacccacctttctttttgtctggtcaattcctactcaccctttcagaccccattcaggcaatgccaccttcaggaagctttccctgatcttcccaggctgtgttagatttcctttctcctttctaagaacccctaacttatctctgtctgcattttttttcatagtatatgaacagactattcaatagactgcgagcttctaaaacacagcctgggttttcaaatatctgtattcccagcatccagcacaagttgaatggcttaacatcttttgattaaagaattctgatagaatttgtgtgtgttgggataagtgccagtttaggcaggccagcccctagctgagagttgactcctagggttggttttcctaaattgtctctactttttagacacttcttttctattgtctcttctttctatccacacttctgggtaagtttagttctgttttcagaacgcatttattgagcacctactgtcatatgccaggtagtaggcaggacctggttatttgaagaattggcacaggggagtgtggcaggaagggcttgaactttgaagtcagaaatgcctggatttgaatctgttagactttgtgcaagctatctgccatccctgagcctccattccctcagctgcaaaatgatcataagagtaagtctcagaattgatttgaagattaaatgaaataataaagatggtgtcttgaactagcctggcataaagtgagtgcttggtacattttccttcctctgttgcccacttcaaggagctcacataaaagtttcctaaaaggctctgagatctgggccaggaacagtggctcacacctgtaatcccagcactttgggaggctgaggccggcagatcgcctgaggtcaggagtttgagaccagcctggccaacatagagaaaccccatctctacttaaaaaaaaaaaattagctgagcgtggtgccaggtgcctgtaatcccagctactcgggaggctgaggcaggggaatcgcttaaacccgggaggtagaggttgcagtgagccgagatcgcgccattgcactccagcctgggcaacaagagcgagactttatctaaaaaaaaaaaaaaagaagaagaaggctctgagatttggccacatcagttctcatggtaacgacagtgtcctgtggacatggcgctgtaagctgggactgcctgttgacgtcctcctgataaggaaggggagatggatatgaaggaactctttatacaagagcacgattcttttctgatgaatataatgaagccactctttcccctcttcatgccggccctcgccgcctccccgtcgatgtccttcccatcgctcctctcctttatgcctcagcctccgtcctgactctgctctctaaaacctctcctgaataatattcaaagctgcgtctgcgtctgcttttggtgtcggccaattagccctcattgtaaggttgtaatatgcttcccagagaagtggcacaattgttgtgtgcttttattcagtgatgcttcctaccactatatggaaaatgtaacaataccccctcacgccctgctgaaagcagcccgggtttgaaaagctttcagaaggccatctgccgtcccctcagccaagcagaagatcagacacgaggccctgcattagttagcactctaagtaaaaggtatcaagggtctgtattccttttcatctcatcctccattataatatgggctaaagaaggaaatagacttgtggctccccagctgagagaacactgagccatagcaggagtcttgtcggtgaaaagggagcaggcctttcttttctgatatgaatggagccagtgtttgcagccagcgccatgctcccaagtgtctgccaagcggccattgccagctttgctgggttacactggacatcttgggagacaactgcgcagatgagagtcccagagtggggacatggttaaataagtacacaaggaagtggcgagcgctggctgagcgtgttctggtcaggactagagaaccccctgccaccagtgccatttctctttacaccctccaatgaatttggctatgaatactaatttaaaagattattcccatatccttaagggtattgaaaaagatcatctctagtatgttggaaatgttgtttttagtgaaatcaaacaagtatgttaattgcaccagcaatggcaaaaagtttcagcaaatcttaattggcatttgggatccatataagtatggataatgccattggcagagtaaaatatctgttcctgtaagctaaagataatatggacagtggcattaggaatacctcccctggcccagcaaaatgccttagagacttagcataagagattcaataagaaaaaggagattaactctgcttctcagcagcttctgggagtggtatggctctagggtcaccagtgtattgctagaaattgtaagtgctctttctgcagagaaatcttcaatcagaagaaatccacttaactgaaataaatgatctagcataaagcaaaaactagtttcagtaaacaagcttaagaaatggcatgttagcgcagtatctaatgttttcagtaatcgagagtgttctctaattttctcagcaaaggataagtcgtaatattttgactcttcctttcaaagacaaaaaacatccattggttgcctatatgttttttctacgtcattagaataagcacaaaaaaagggaggggggcattagaattttctcatgttaaatttgtacaaaatccttcatagttatggtgaattttttccagggagaaatccagaggagatcctgaaaatcaggggtgaattttatttacctgagctcatgagctaataagatgctgacctgtctcaagtctgcattcctgaagaggggctgacacagggcccttcatttcacaaaggctccagttggatgggagcagctttggacacactttccctcacaggcttcctgcctgcttgacttgttcagaatttcagggtcaaagcctggtttccttagagaacttaagggttcctttggccttcaaagatagtctgggtacagagagaaggaggacacgggccccaaaagaacaggacaaaccagatgaatcagcttctattgggctccacgagcctagaaataaacattttaaatgatccaaaagctttataagtgacactgctgaaacaatatatccaccaatcacagaatcaaagttattgtaaaaactgctccagaaagaggtgttttgctttcctagataggcgttagtattcattttctttttttctttttcttttttttttttttttgagacgaagtctctctctgtcgccaggctggagtgcagtggcatgatcttgactcactgcaacctctgcctcccgcgttcaagcgattctcctgcctcatcctcctgagtagctgggattatgggtgcacgccaccacgcccggctaatttttttgtatttttagtagagacagggtttcaccaggtctcgatctcttgacctcatgatctgcccgccttggcctcccaaagtgctgcgattacaggcgtgagccaccatgccggcctagtattcattttcagtcctcaacattgggaacacaaaagactcagtggtagctcacatgaatggtctggaagaacagtgagcctctcttgccgcctttctgttacagtgacctgggtcttccctccaccagccttcttgggatgcacacagtcaacagcaggctcttttcagcccttactcactttcttccccatttaatcattgttcccttctttctccatacacatgtttcattgtcagcttaatgactttggctcagagcacttgcctgcgcacatgcgtggttttcattgctcgtagtgtgacgttagtaaaagttgtttgaaaagcttgtattttaaaacacattcttcttttcttatccctcttgaaaatctttactaccttttcttagcagacaaaaggctctactattgtttgttcctccgtgtgaatattttgctttcatcttcatttgtggttaggaggttagcttcctttataaaaatgtttagaagattttttttttaacaatgtttcttatcattcttttttactttggaattttaaatgacttgagctttgtgctgtcacagtgtttctcatctgacacagtggattcctgtcccttctgctttgagccctttgccatactgtaaaaatggaatttctgtaataaaatgttataatttgagagactcttcagtttacagtgactgttgacccctaaccgctacatttctcagccagtgtctctctgtgaaatatttagtgatcgtccacatacaattgccctgggagagcctacatttcaaggaatttctcaaagaactttttttttttttttttttttttgcaggatattttttaccaacacaaacagtaactcctctatttgtccattttgtaggttgggacatttatgctttttaggtaacgtgtaatcatttgactgtgaaaggaattcgacaaattcgtaactaattgattatttttaaaaagcaaactgcatgttctaatgattatatccttaagggtttttttttttaaacctttttgagggaggaagattaatgcaggagttggaaaaaatgattaatcaaatgtcattctagttttcctgtagattctcaattctggtgacaattagaaaatcagttggtttctttggaaatcctagttaactatttgggtatttatttctatctaaaaagcaacccgtcatcactcatcacaaataaaactaagagtctcaaatgtttggagtaaccccacactttactaactagtcatgtgtctctgtgacggttaacactgtcaacttggttggactgaaggatgctaaatattgatcctgggtgtgtctgtgaggatgttgccaaaggagattaatatttgagtcagtgggctgggaaaccagacccacccttaatctggtggtcacaatctaatcagctgccagcgaatataaagcaggcagaaaaatgtaagaaggtgagactggcccaacttctcagcctatacattatatttttatatatatatatatatatatatatatatatatatataatgtatataaaacaatgttatagaacaatgataccctgactaatacagtctcttaggtgcataatgataataagcattcattaaaaacgtattatatgccaggcactgtgctaagaaatttatatgcattatctcagtccacacaaatatcatgctattgatattatccctgtttttcagattgaaaactgggcttggaaaggtttagtacattgcacaatgcagagctgggattcaagcccaggtctaggtgacttcaaagcctctgtcaaatgacaatgcatcagaattgaaattagtagatagatagcatttctgcattgtactgactaggtagaagcaataaggtgcctgcattgcaggtactgaataatgaaatatggtcctctagttatgttatgaggtcattgtttcaaaaatgtaatcatagaatcagagggcaagaagagcccagaggctctctaccaatattggaatatgctcagacatgaaagatagaatataaaattgtatctatgttgcgattacaaccatgcaaaagtaatttatatatatggactagaatgcgaagggaactcggaaaaatgtatgtattagtgtgaagggattacaggttattagattttcatgttatatttatgcaatttttttcataaaaaatgagattaatactagagtttttctaatatatagaactaaggtattaatcctaacatgggtgataattttcagaagcatgtgaaaatatcagtggttggattatggacatctgtcgcaacaccactatggtgatacatgtgaaaagttgtttaggaaaaataaaatggagaaagtggcaaatttagctacaggatattcaaggcatggagggtggagagtaaaggagacacggcacaaattgtaaacgacacccttcagcacagtcatgtcttttgcattttatcccttattttgaaataatctcaaactatagaaaattttcaagtaacttaaagaagattctgttttgttcctaagttatttgaaagttgcctgtgctctatcactcctggatacattagtgtatatttcttacaaacgaagactttctccttcgtaaccacaacacaaccaataacatcaggaaaatggcatccctacatcactctcacccaatcttcaaagcccactgaagcttcaccagttgtcttgataatatcctttacaaaaagtatcattttaaaatcatatgttgcatgtagctgtcatgtcaccttcatctccttcaatctggaacagttcctccatctttacttgactttcataactttaaaagattatagagcagtcattgtgtaaaatggttctcagtttgtgttttctgatgtttcctcatgatcaataagtttggcaagaatatagcagaatgatactgtgttcttctcattgcatactgtcaggtggtatataatttctatgttccctttaccagtgaggttaactttgagctcttgattacgggtggtgtctgactcatttttccttcagtaattagcacgtattttagagggagatattttgagactatataaatatttcatttcacatcaaactatttatttatttatatcagaatagatttactttttcccaatttattaagtgagttataatcctcagtatatccttagagaaggataaaaggaagagatacatagtaccttaaaatcttttatttatttatttgttcatttatttagagacagggtctcgctctgttgcccaagctggagtgcagtggtgcaatctcggctcactgcaaccttcgcctcccaggttcaagcgattttcctgcctcagcctctggagtagctgagactacaggagcctgcctccaaacctggctaatttttgtacttttttttagtagagacagggtttcaccatgttgaccaggctggtctcgaactcctgacctcaagtggtctgcctgcctcagcctcccaaagtgctgggattacgggtgtgagccactgcacccagccttaaaatcttttatatatggtaatcaggtgtacagagattctattcctactgccttgaattattcaaatttacacttatattcacttcatttcttctccagtaaatttgtcttcaaatttttcaccagtagagatagggaagggcattcaacaaggaaaagtggaatattcctttatccattcacccattacatacccagctgtcagttccgtgtatctgatttgactctcagcctggcacctcctgcagtgaatgccactggatggaagtgggtgtagacaatgcatgttcctattgccatgtggctgggctcctgaagttgttaaccttaatttccctaaggagataaggtgtttataaaccaaacattggtattttcacttggatctcaaagccaggactcacattaggattatgaccttaaattctacatatcagatatgccactttgtcaaaatggtgagacagatcagagctgcctttgccatctcactatactacttttcctaacccatcgtagttggtattattttcgtcattctaataaagaatgacgaatagtagcatctttaattcgttataccccacatcttctctttctccccttttcctcattccctcaacaaatgttttatccactgtgtcctttgttgtaatcttgcctctgatcctctcttgagtgctttctgtggtgtatgtctcctttccattgctgtgttctgtcttccttcccttcctttctctctctctaacgcctatgcactcctaatccctttgctttctcgccctggtctcagggcctgacctttgcactccactcttctgtccttcccctgattcacactccctattgtattgatggcttacaggtttggagataaagcaacacctgagttgaatacttttttaaaaagttttacctttattattttaagtaaaaggaaaaagaaatctttggctcagataactttgagtttacgcacttgtaatttgcattaccagatagttacgatcattgctgctaagtccattaactgttcacatacaaacattgctgctaagagctaacatttcccttgtttattacccatttatggagtatttttcttagaaacactgagtaatgactaagtttccaagctctagagttgaagtccctgcaatcaaatccttgctcagctagctgtggtaacattgggcaaattatttaacctctctaaacttcagtttcctgttgataaggctactgtatggctgagttagcctatagtgcctgccagccttctcagcctgggttctgagagggaactaagccttcctaaggtgttcattgtatgcattgaattaaattctttcattgcatctagaaaggtactagttatacaacacccttgggagaattcagaaagtagtcactcaaatccttttctgtgttttgtggttcatttggggaaacctggttgagaaaggctaggattctgaaatagaaaattccctttggaaaactgcataaaatttacttagccttcttaaaatagaatcaccattccattttaatcaccattctattaaatggaatcaccatttcaagaaagaggaagaacttatatttctgtcacctagaatacctattcatttggaccaagaactctttgatttatgaaagttgaacagattaagtgcaattccaccaggatttaacatgtatataacatattttgcattttcattcagtgtttgttacagaatgagagaaatgtctttaagaaactatttgttctgtatattatggctgtgtaacaatttacccacaagtttgtgttgtagagcgacagcgtttcattttgctcactattttgtggctgagtgattcaggaagggcttagctgagcagttctcccttaggggtctctcctgcagctacagtcagatgtgggtgggggctgcggtcatctgaagttagacaggctgtgtatccaaggtggctcactcacacagccacggtggaagctggctgctggctgggagctgagctggagctgtcattttgagcacctacatatggtctcttcagtatagtggtttggggggaattgtatttcttcttggtggctagttttccctagagtaaatgttctaagaccaacaaggaaggttgtgtgtactttttatgattgattcttagaagtcacacagcgtcacttccattacactctctgggtggaagcagtcccaagcctgttcagcttcaaggggaaggaacgtaggagaggatgtctgtgagggcatgtcaagggatttgtgaccatttaaaaaatcaccacagctggtcctctggacacagattatttatatccttctaaatttacatccttccaaatgcaaaatacatttactctctcaagacgccccagaagtctcattcaatatgacatcagactcaggctggagacgtgggatctaaagatgcccatgcagatatgagtgaggctcctcagggatggtccttcagatgctttgtactctctctaaagacctgtgaattaaaggctcctcacacacccaggatacaatagtgagggataggacagcatacatgctcttcctccgcatggaactctaaacaagatcccattttttctttagtcgcttgggttctactaccaggcaggcagtgtgctagagtcagaagactttttgtcgcccccttgtggtgaggcttcaggcaagccacttgactcctctgggtctcattttccaggtataatgaaataagactgacaggtcccttgagaactatttcagctcaacagttctgtgatttcgtgaaatgccaaaattgtgctacttggatatgaacagacacaaatcattgtgcataattaagaacattccacaagtagagaatgttactaaaggataaaattaaagtatgaattaataaagaagtaaattttgtgggaaatagaagctgattttgaaccaattttgccactagaggtcaccagcataccatctcaaagagaataaataggcttttgtcactaatagttccctgtgtagaacccctaagtggcattcacggtgtcttttcatttacttggaatatctcctgacagttgtcagagacatatgttatgatgaggtgatgtcagtgtccctctaggtgatgttcccagtgtacctaacgttctgtaagcgtgaagagccaccaccggaacagtaaggaaaatgactttctaggattttctgctttctcactgggatgcgatgaggggcagagagataacttgataggaagtaatataagctctgaggcgaaaaggcaatgtggaaatccagtgtcatcctcaaatgcagcacagacatgtcagcttttttatgacacagagaaagtacggactgggaacagagcactcgtttattcagccaatgtctgtggacctgccttcaggcactgtgcttggcaggggctatatcaatggagaagatgcagttactaccctcaagggatttaagaaatgaagtacaggaggtttctattcagattcaatattttaataaaaaatgtttttattaatggccattgacttctactgatgcttcctgaatctccagctcgtgtggttctcttcctttttgaactttagatatccatccagcaccttctgcgacattttgtagtatttcccttaagatactgtataaagaaggaggaagaaaaataggaatttgacacagaactaaagattattccatttagaggtttttgggagaagcaggctgggatgggccctgagtttcgctacatatttttgctggtatgccaagagtactgacaccatgccaggcaacttctctcagattttcttattttatcttgctgacagacctgtagggacaggcactgtaatcaccatttctgtcaatggtcccttgcagcacggcagtgggtttttttttttttttctggaaagtgatgctaagagtacactttaggacttttatatcaaagctagaactgactgtcacgtgacaatgttaaaatgctgacttcagttgcggccaatggtgcttgttaggaaaaactctattaaactgtattttaggccagcgcagtggctcacacttgtgatctcaacattttggaaggccagggtgggaggatcacttgagcccaggagtttgagaccagcctgggcaatataatgagacctcatctctacaagaaataagattagcgaggcatggttctgtgcctgtagtcccagctatttgagaggctgaggcaagagaatcacttgagcccaggaagttgaggctgcagtgagccatgactgtgccactgcactccagccttggtgacaaagtgagatcctctctctaaataaataaaataatgtattttaacgtaaaactctttgggtgggacaaacaatgctccaagtaaaattaataccttgaaacgtaaagagtcatggagatctcctgtgaagaaacttctgtgagtgacaagaatggattcagaatacctctgaggactacatctattttctcccaaaatgaaagctacaagatactttcttgtaatgcgcttcatgtagtacaaaaagaaaatctacaaactctagaactcataattctataataaagaatgagttgcaaggaattctgggctctttcaataacttgaggagctatttcttctaaggctgaaggggacttgaacttgatttaaattggttgtcatcagcctttagagcagacactgagagtgattctgagcacgacacagacacagcccctatcccttagtagcaaggctttctttagttttctgccttcactgaagaaggaaagagagagcctggccatatctttgcttcacactgggcatgatttgcttcactgcgatgagtgttactaactatcctggtaattactaattttaagcaattgttttaaaacaaactaaagaccggctaaagacaggtgtgtccttacttcttcttcttcttcttcttcttttttttttttttttgtgagagtctcgctctgctgcccaggctggagtgcagtagtgtgatcttggctcactgcaacctccacctcctgggttcaagcgattctcctgcctcagcctcccaagtagctgagactacaggccaagccaccatgcccggctaatttttgtatttttattacagacagggtttcactatattggccaagttggtctggaactcctgacctcaagtgatctgctcacctcagccaccaaaagtgctgggattacaggcgtgagccactgtgcccagctgttacttcttattgttgtagggtttggtcaaatagtggaaaagaaaggttagggagggagctacaaaaatactacttgacttattttaaaaatatttctattaatggccactgacttctactgatgcttctttaatctccagctggtgtggttctcttcctttttaaactttagatatccaaccaacattttctgagacattttgtggtatttcccttaggatactatataaggaaggaggaagaaaaacaggagtttgacacagaactaaagatcattcaatttagaggtttttgggagaagcaaactgggatgggccctgagtgtcattgcatattcttgctggtatgccaagaatacagtcaacccaggctttactcaggtatgttttcagagagcaactttaagggatgaggtaatgcctctctggttaaagagcaagcttgcttccacttgccataaaagccaaagattccccaaactcaatgttcctctcctatattataacccgctgcatgtataggcatctacaggggccctctgcctcatccctgtgggacttgggggacataggtaacagcaacaaatcagcatgaagctcatgatgagctgggagtaagagagtccttagactctgacccagacatctcatgtcttccgccagcattcatgaaacaggcaatcgttagcttgtaagtgcagctgacctttgaacaccatgggtttgaactgcatgagtccacttgtatgcatttttttcagtaaatataatggaaaattttttggagattgtgacaatttggaaaaattcacaaacttcatagcctagaaatatataaaaaattaggtatgtcacaaatgcataaacatatgtagatactagtctgtgttactattaccataaaatatcacaaatctattataaaaagttacaatttatcaaaacttatgcacatgcttacagagcacacatggcaccatttgcagttgagagaaatgtaaacaaatgtacagatgctgtattaaaccataagtgcataaaattaactgtagtacatactgtactaccatcataatttcacagccacttcctgctgctattgctgtgagcttaagtgctgtgagtatccacttaaaatgccatgggatgctaattatctctgtgtgagcagttcatctctctggtaaattgcctatagcagtaaaaagtaatctcttgtggttctctagtgttttttcattgtgtttagtgcaatactgtaaaccttgaataacaccatggcacccatacaaagtgccactagtgatgctggaagtgctcccaagaagcagagaaaattcatgacattacaagacaaagttgaattgcttgatatgtattgcagattgaagtctgcagctgtggttgcccaccgtttcaagataaatgaattcagcttaagaaagattgtaaaaaaagaaaaggaaattcatgaagctatcactgcagctacaccagcaagcatgaaaaacttacactttttgcaaaatacctttttatctagtattgaaaatgcagtttttctgtgggaatgcaggattgctataagaaaggcatacctactgtgatgtgatttgagaaaaagcgaagtcattatatgacaacttagagcaaaaggaaggcgaaggatgtaaacctgaagaatttaatgctggcaaaggatggcttaataattttaggaagaggtttggctttaaaaatgtcaagataattaaagaagaagcttctgccaatcaagagacagcagacaagtttccagatgccattaagaaaatcattgaggagacagaatatctgcctgaacaggtttctaatgcagatcaaagtgccctattctggaaaaaaaatccacaaaggacatttattagtaaggaagagaagtgagcaccaggatttaaggcaggaagggataggctacctatactgttttgtgcaaatgcaggggggttatgatcaggactgcccttatctataaagctgctcatccctgagccttgaagggaaaagaaaaacatcagctgccagtcttaatggctgtacaacaagaaggcccagacaatgagaaccctttttctggattgtttccatcaatgctttgtccctgaagtcaggaattaccttgcccatagggactacctttaaatttttttctgatattggacagtgcctctggccacccagaaccccatgaggtcaaaactgaagctgtcaatgtggtctacttgcccccaaacacaatgtctttaattcagcttctagatccttggctcttaagaacccttaagccttattacacagggtactcaatggaaaggactgtcaatgccatggaagagaattctgatagagagagcatcatgacagtctggaatgattacaccattgaagatgtcatcgttgttataaaaaaaagttgtgaaggtcatcaagattgaaataataaattcctgctgaagaaaactatccagatattgtgcatgacttcacaggatttaccacagagccaatcaaagaaatcatgaaagatatggatatggcaaaaaaaaaaaaaaagtgaaaagtgaagggtttcaagatctggatcttggagaaatgtaagagctaacagataccacagcagaggaattaacagaagaagacatggtggagattggtgctttcaaaccagtgccacatgatgagaaagaagacatagaagaggcagtgccagaaaaattgacattagacaatctggcagaagggttccagttattcaagactgcttttgacttcttggacaaaaagaatggcatggcttctatgatacaggcactgaaacttctttgataaaggcactgaaaccaaagcagtggaagaaaggtgttaccatatagaaacattctaagagaaatgaaaaggagcaaaaagtcagacagaaattacaatgtattttcataaagtttcactgagtgtctgactctccttcctccctttttctcctccatctcttctgcctctgttgcctctgggacaggaagaccaaccccttctcttcctccttctcctcagcttgttcaatgtgaaaatgaagaagatgaagactttcatgatgacccacttccacgtaatgtaaatatattttctcttccttcttactttcttaataacattttcttttctctagcttactttattgtaagaatacaacatatatacaaaatatgtgttaattgactgtttatgttattggtagtgcttccagtcaacataggttattagcaattatactttgggggagtcaaaagttatacatggattttccattacacagggtattggcacctcctaagccccacattattcaagggtcaactgtagggtaacatcccagatcctgacaaaagctgacagaggaactctaacaagttgattatttttatcataaatggttaccagggaaacagaaaactgtaaagatcatgtttgtataatgcaattttaaaaatccatgagcagcctagcattttagagccttgcttgcaatcttgggtgcctccttttctttctttcttttttttttttttttcccaaatagaacttttattacttttctaatcacctctttcttgccaaacgcttttggagcaggtgctttctgggctggagctttttgacccttctgagcttttggaggaggcgctgccttctggcctgtggctttctgggcaggaagcttctaagctggagccttcttgcctgcagcggtcatctttttgctagaactttagcagcagctgcagcagcagtagcacgcttcgcagcaggtgcttttttgggagaagcttttggagagctgccttttgaagcttcttaacttcattcttgattattctgttcctcattgccttcataactttaaaatgatcaaaatctgtcatcttggctttcctttctctggcttcaatcttcttggcccatcgtgtggctgcccattttgtattgatgtttgccttctgccaggcttgtctgacatacttctggtgggctctgtgtggaaacttgaggttgaaatcagtgagctgcatgcacttgaaaggcatggtctgtctcctcacttgagtgcaaggtccatcaaccaaagccctgttttgatcaataacatctacagttgcaaccaattttctggcacgaggtccagaggggatgtagcccacacggccaacctccacgaagcgcctgaacaccatgttggtggcgtttggcaagaaggaagaaggccaggtgcattcttttataaaatattagttattgaccaggcgtggtggctcacgcatgtaatcccagcactttgggaggcccaggtgggtggatcgcttgaggtcaggagtttgagactagcttgaccaacatagtgaaacctcatctctactaaaaatacaaaaattagccgggtgtcatggcaggcacctgtaattccagttgctcgggaggctgaggaggagaatcacttgaacctgggaggtgcaggttgcagtcagccaaaatcgcaccactgcactccagcctgggcaacagagcaagaccctacacaccagcctgggtgacagagtaagaccatttctcataaataaataaataaataaataaaaatattagttatcactgtaaccctgacttctatgctcttcagagaattactttatgcttgttaaaaacagaatctcctttagtgacccagacacatatgattaatcttgattttaaagccagattattttttttttgagatggagtcttgctgtgttgcccaggctggagtgcagtggcgtgatcttagctaactgcagcctctgcctcccaggttcaggcagttctcctgcctcagcctcccgagtagctgggactacaggtgtgtgctgccatgcctggctaatttttgtatttttagtagagacggggtttcaccatgttggccagaatggtcttgatctcctgacctcatgatccacctgcctcagcctcccaaagttctgggattacagatgtgagccactgtgcccagtctaaagccagattatttttataaaattttagtgagcaagtacccagctgacatgattgaaaatgtagattcgtgtttagagaatcacagaatcacaaaatcacaaaagctggaatgaggtggctcaatgacaactcactcagaaaatatgctttgagaacctgtggcaggcagggtgccaaaagctggatggtcagacacaatcttaccagcaaagattgactcttaaatatagggaaccattcacttaactcactggtagtgttgtttgataaagttcttaatgttattttacaccatgttaagaagctaaatgaactctcttccaagccctcacttgaggaaacaggggtggacaggaaagtgactaactccctgcagtctcatggttaatttcaaatatttgaatgctgtacagtatctagctcacgatatagtcacaaaactaaacttttaaatgagcaaagaatggaatgaattcaatctaggctgagccagaacaagaacccaggtttcttcttcttcaaaccaatgcttgtcacgttgttggtagatcagagttttctgaaccaatcatatacctacatcataatttttgccacattaaattaaccatttaattaaaatcagttttgaacttagctttattctaagcaacatgttaacatctgtgaattgagaatttcttgtattattcgtatttattataataaaataaacatgtaattatttttaaaaattcatcttgtacaaccagaggtataaataccaattctgggggaaatgctaatttgaaaatactatctagagaaaaataaggactgtaaaccaaaaagtatctcagacaggtctcattcaatttagaagttgattttgccaaggttaaggacatacctggaagaaaagaacacagaatcacagaaacagtctctggtctgttcctttatccaaggatgactttgagagcttcagtatttaaaggggaaaagtgggttggagaggtaagagcgagggtatagtaatctaagttgcaggagaaaaggcgcaggtaggggaatggtgaatgatgcattcatcttgtgtgcagcaaatcagcactttacatgaaatagggtgaacatagagtagctacctatggagatatttaaccttttatctgtagctatctgcttaggaacagaagaaaaggcagcttcttgcatgactcagctttcagcttatttttttccttctggcagagtgaactggagtctcacgtttttattctcctttcacagcaccgagactgcacagaatcattcctaattatttccatttttatgataaagtccaaagcttgattccataaagaccttgaaatcctttggaattcttgcttgaaaaaactctaaaagtacattggtaatttcttacattccctctacctattgaacaaataaatgaaaatgactcatcaaatttatttacttttggttattatcagaaattataatcttgagaaagtatacatgaacaccttaatttaccaaatagctatatggtatactgttgagtatagtatactaggctgtagtatacaattacgtctagttttgaaatcaagttttaacaaataggttatattctttactcaccaaattcagaacagcattcattctccaatgaattcaataacctttcaagtgaaaaaaatgagtaaaaaagaaaatgtgagttcttatttaggaatgagatggaacatgttctgcaaattaatgagcttaaagcatcagacaacacacctggttatacttgaaagttatcaaaaatgcttccatttagcatatttcaccttaaatatccacagtacgtttagaaccctctaattaagacaaaatagcagcttgtatgtgcacaatgagagtgtgccagactggaacatcaaaaagatattggaagttctctatttcattatttatcatttcttcccccacataatatattgccttgtacagttttcaattaggacttcccccattctctaggaaaaaaaatgtaattttgtgcctttatttagatgaactatattatcaatattcacatagtccaggtcgcatgaatgttcaccttataatcaaatatttctatgcaatctcagtggtttctatttgtacttatagcctttccttattcagaagggggatttttttttttttttttttttttttttttttttttttttagatggagtttcgctcttgttgtccaggttggagtgcaatggcgccatctcagctcactacaacctccacctcctgggttcaagcagttctcctgcttcagcctcccaagtctgaaagctgaaaataagctgaaagctgagtcatgcaagagctgcctttttatgtttacattttagtttaaaattactttctaatttttttgtgtgtgacttcccctgtgacccatggtttgtttagaagtacatagtttgatttccaactatttggagatttacaaatatctttctgttactgatttctagtttaatttgtgggtagagacaataatttttactgtttcaattattttaaatttgctgagatttgtttgatgatacacagtggagtctattttgatgaattttccaagtgcattggaaaagaaagcatgttcttcagttattgggtgcaatgttctacaaatgtccattaggtcaagttggctgataggattgttcaggtcttctatatcaatagttcagaaatttgccagccttttttcaaaatcaccttcgtaactttcaaaaatactaatgcctgtatctcactccttaagactgtaatttattctgaggtgtggtctgttcactagaataattaaaagattcccaggtgattctaatatactgaaaagtttgggacctgagttctgtatacttaaattatctgtatagttgttttacaaattgcagagcagggagtaatgaactgtttgaattcaattaatttttgattcatttctattttgtagcactgtggttaggattttgtgtcttcttgatgaatatgcccctttatctaattgttttaatgttattttacctaattattagtgaaggtaaacattttttaaaaacctttctggccgttcagttttcctcttctgtaagtggcctacttacgttatttgcatatatttatcttgagttgtctttttcttactgatttgtctgaattcttttttttttttttgagacggagtctcaccctgtcgcccaggctggagtgcagtggcaccatgtcactgcaagctctgcctcctgggttcatgccactctcctgcctcagcctcccgagtagctgggactacaggcgcccgccaccacgcccagctaattttttgtatttttagtagagacggggtttcaccgtgttagccaggatggtctcaatctcctgacctcgtgatccacccgcctcgacctcccaaagtgctgggattacagccgtgagccaccgcgcctggcctgaattctttatattttgagagttttactatattctgccaacctgtggcttgttttttaacttgattagagatggcttctcttctgtttgtaaaacttccaaattttaaaataatcaatattttacatctttccttaatgaatcgtgctgtttcttccctacggcgatatacagacatacgcttttcttctaaaagtttagagttttgtttgtcacattttggatcattatttcatttggaatttagttttatttctgtcgtggtatcaggattgaatttcttatttttatataaatagccaatttaactagaaccaccataacttgtgttttctatatcccacgaacagttactatactaatttacactcccaacagtaatgaataatagttttttccccacaaccttagaaacagttattcctcacccgacatctttattgtataccaacttccaggtaccctttttttcctaattttctttttgtctattcttgtgtcaataccacttttttaaaagttgctttaaaatagaattaccatatgattcagcacaaattaacacacacttctgggtgtatatccaaaagaactgaaaagagggtctcaaagagacatttgcacacccatgtccatagcagtattattcacaatagccaaaaggaggaagcaacctaagcgtccactgatagatgaataaacaaaatgtggcataatacacataataaatgatatatagaactattcagccttaaaaaggaagttctgcaatatgctataacatggatgaactctgaggcattatgctaaatgaaataagccagtcataaaagggcaaattctgtattattccacttaggtgaggtacctagagtagtcaaactgataaacacaaagtaagatgattactgccagaggatgaggggaataggaaatggagagttgctctttaataggtatacagttttagtttggcaagatgaaaagagagattggttctggagattggttggagaacaatgtggaatgtatcttatactactgaagttaaaaatggttaagatggtaaattttattctatgtatatttcactacaattaaaaatatttaaaaatactgttctagcaaaaacaaaaggttgcttttaatagtttctcttgatctttggtgtcctgcaatttcaccgttgcatagaattcttatattaatcctgctcaagaataagtacttcttgaatctgaaaattcaaatattccacaatcttggaaaattcttagttattactctttgaatactgcctgcatccattctctctagtctctcttttttggcactcctattagatttatgttggattttttttcatttatttagctcctacattgcattctagtaaatttcctcaaactgaatattgcagtcgcagccaaatgcatagttctcaaaacactgaatagaagatatttttatatagctcttaaaatgattaaggcgatgtgtcagcaaactgtgccagaagtaaaaagtcaagaaacagggagacataaggcttgtctctacagcttaggaggctgtgccaaagccaaaataataatgtattgctgtggatgtctaccttgtactcaacgaatattaaagcaggatgccgctttgtgtcaagtactagattacgatgaacggtgtcacgaagaacactccactcttgataccgtatatgtgaccttgagcaagaaatgtgttcacgctcaggcttcagttcctttctgtgggttgctgtgaggctccacaggggtaaggtaagcacaagtgctatgcctcagtaccactagggtattttctcaattctaaaatattaaatggccacgcactacagatttaataatagtttcggaggaggggcgtgaggagaggaacattccactagctcaactataagctttccgatttcggaaataagaaaaatatgaaaaagtctgcttttagaattaaggaacgacggtgtcgcgttgactttctctgcttggttcgcaaacgctcttttctcgaacttgaatgacttctctgtcgctcataccaacctctttcctgaatgacttctctgtcgctcataccagcctctttcctgattttccacactgggattctcactccaattctcaggtttcctgatagacctgatgagccgcttcaccagcgccgcttagcttcgcttctttactgtcattggctgtcgctgttccaggtcccgcccacagcgacctcaatcctgattggatgtcagtgtccttttgttatggcaaaggtggatcccggtgctttgagattggacgactggggtgaggcgggcagctaatgcgcaggcgtgtattctcgagtcaggattggcgggcgagcggctgggacgggatgggattcttctcacggcgcacgttctgtgggcggagtgggcggagctgccggggtcagttggtccaagtgtcccggcctgaggtgtcggccggatccctccttctcccggcgcctcaagcggaaggtgagggccgtcccgggcagcggagggcctggccccaggcgactagagctgcatcctcagtacctccgagggcctggagggcggggcgggctggacgcggccctgcgcaccgggggcccgggaggagcggtctcgggcctgggcatttggtgggcggcggaggcctggctcccggcagaacccttgcgcgacctctttttctcctgttttcgttgtcaggcccaggcgttctttgggagagggacctctcgcggtccctgacgcagacatcgtgtagctttctccccgcagctcctgggtcgggagccgctttgcagctctcggctctggaattggactgcgggaggggcgtttgggtggaatgggacctggcacgcctggaccttcccgtggctgctctgcgagagcctgagagatgggaggggaggctgaggtggggagggagcctagagagccgtaaaataaggattggaccatttttccaggcggcgaaagcggcacctgggtttgtttcctgatcgtcttctcccccagagtcctgctgaacaagttttgggaagaaaggtttggaaaggagaaagaggatacattcctgaaaggcagggcttctgttatacagtgtgtcaacctcacactattacgcaacaataaggacagatgccattccaggttgccaacacgttttctatgcccgaggacccaaagctgtgcccatgtattctggtacctctattcctgattaaaatcagtgtagctagccattctctgagagtatagcttccatttaaatcctcatttggccaaacagttccttgatcttgtggaatttgaaactggatttatttaaccaggacaagtcaaagcagaacttgaacagatctgaacagacattatattgaagttccgtagcttgaagggaatggagtttattttcagttgcttagtaaagattccagaggagtttgacatcagtggtagcaaaatgtttggcaaacttaagattagggccatattaaagttttttccattgcataatggaaaaagcatggactgtgaagttagacctgggttcaaattcttggtagagacattggctgtgaaacctctgaaacagcttttctgaaagatatatagactttctgaaatttagtgtccatatctgtaaattgcagtttccttctgttgatttgatgaaataacatatgcaaagcatttagcacattaatgcacgaagacattattttagcagtcttagtagttctccagtatgacagatggtgaaatcaattttagatgcagaaaagttgagtggctgaagatggacgggtattaggaaaaagtctcaaaatctgcaggctcagatgtgacaatagttgtggtggaatggtggaaaaaacactgggcatttgttgtagtcttggccctgttgctaactacttctgtggtcttcagtaagccattgtcatctttggccttgattttgtaaaatgaagcagctggaccagatggttttctttaaattctttctgttgcccaaattagagctaaaaggtagagaagacgatagcagacatttattgaatacctactatgtactaggtactgttgccaacacattgtatctatccactcattctcacaacaaacccatgagatacgtacggttattatccacattttacaaatgaggaaacttaaggccgaggtgttaaccttgcccagggttccagagcttataaattgcagagctaggatttgaatccaggtaatctgaatccatattgttaatcattgtgccaggctgcctcttgaggagagtgatattgtggatattgtacactattagagataactgtaaaataagataggggcatatttggtaagatgatcgtctttggtcacaggtgtgtgtgcatggcaaaaattatttaattaaatgaatcttgtcccaatgtttgccacatttcctggtttgtattctctctatgcgttctgcctcctggacttaaataatcaaaaaagtaattctagattcccttccactaaccaaggctagatacccgaatttactgtgttttttgagaaacctttgaaaggtctgacctagccatacatcagagctgaagaatctcagcgaaccatgtccatttctggggtaaggtggtttaggataggcagagcagcctcagcgccccaaattcatttcagtgttcccacgcttgagcagacttggtcttaattttctcgtttttcatcagatttgcgtttatatataggagcagaaggagttgaaagtgaactcttaagagcatatttgacatggaattagattgatgttatagcaactataggtaaaaaaggattttatagttgaaaaatttgaaaagctcagtattaagtatctgttatgatgtagtactgtgttaatgtagactttgggcagtttggggatcaatactattttaaaagaaaaaatccatggctaaaatactttgacataaagaactcagcaagtcttttgatcccatatgtcaaacaaatcagtttattgccctaaatctactgaaagactttgaatatatattaatacaatagtagcattttgagatgggtctatttgatcacatcacaataaaatacaattgcttcttgttcttttgtcgtggaaaggcagcaggtaatgctgtggtccactgtactaaagagtaatgcccttatgcgtagggctgccagatacagtgggcggttttttcactgtgcaacacttgggatgcaatcttacgtagactgtggtgtgaattgtgctctctcgcgttgtatacccttatagcactgttcttgtggcactacttttgtgctcctgcctctaccctaatcttgagtgtaagagtaatttttcctttaataagccctctccaccctgtttttctgctttttattttctttcactttttcagatgaagtcacactgttgctaaaccatgcataggttttctattgtttgaattatatgtggtcagaatttcagaaactggcttctttttctttacctcttatattggtgagtttggaatacttgtgtttttgcagactttttggtttaatttaaatattagtctgaaacataagcaaaagaagactaccctatcactgtattatatctgacttcaaaatcagctgtgtcgattttctgattatctgttgctttggcttgtatatcttataactcttcttagctatcatgaaaattcgttctagctgtagccttaaaatcattggatatgagaaatttgaagcacttttaatttattatttagcaaagacagatgccaaattgcagcttactcttgctgagcactcccacgatcacttttgcttttggctgttgcctctctcatcttactcagacctcttttagctggatcagtggttgaaatggtatgaaaagagaatgactgtagtacctggttacaggtgtgcttctctgtcagggaaatgtcaaatcaagttttcactgacactcttcctcttcaattatagttaaagagacatgttgattcaatggagaggaatagtttttggagtgtggtctttaaatactacagtaggctgaataacttttaaaaaaagaattgttggaaaaattttagtaatctgaaatgcagagaacctgagaattaaataatgtgaaaaagaggtcgggcagagcaactttaaatgcggtttagataaggggacagatgctagaagacttggagtaggtttattcagcattattaaattaattgtataccatttgtagttaattatttaataatgttatacaagggatatttcatatttttttctagactagtgagtgctatctaacttgaactataaacttgaagtttatgtatatgtacactgggcattttaatttgaagttcatgttagtatctaaagtgtaacaggatttatgtagatgtacactgggcattttcaaatttcatgttagtatctgaagtacaacaagatttgtattaacagctgtgagagaatgtgtaatacactgatatctctattgtgattctagttctagtatgtagatatccttatttaataggtctgctttctactgtttaagatacggaggcataacaatgccttgggcatagaagatattcagtaaatacttgttgaaagaataacactgacaggtctaggttgcttcaatgtagtagattagattggttaacaaatctgttttcagtaataatctggtgacattatttaatatattttgaacatattgaatgaaatgattgttagcaatggagcagaacatgttttatagaaattttttgttctaatatttagaagtcttcattgtaataataaaatgttagtatttatttacttatttacatcctgattagtctgttttgatttaaccctgactaggagctgatgaatggacattttttcatttattccatattaatattttagatggtctagtatttatcttttgaattttatttgtaaaaaattaaacagtatatgtaaagcaatactttaatgaagaagaatatttgaaacaattttatcttcatccataccgtcatccttaatatcagagcattttttcattttcatgttttttatgcatatttatatatatttcacataatttacatcagtgaatatacaattttatacacattttttcatgtagtatagtcataattattttcagtagccactccattagaaattataactgtactcaggaggctgaggaaagaggattgcttgggtccaggagtttaatacagactgggcaacttggcaagaccctcatttctaaataaataaataaaaatatgtcttcttaaaaagaaaatcacaactgtaatttaccagactttgagtgggcagttatgttgtttctgattgacttcattgtaaataaaattgaagtgatttttatgtatataactttctttgcattattgtccttagcctaaatttccaaggtaaaatactcagttaaaaaagatgtaaatgtttttatgaatcttattatcatactgctttccaaaaagattacatatttaaaatttgtgtccagtgtttgtgtatttgtttttccataactctttgctagtattgatcattatctcctttaaaaataataactgtacggtggtatttatgtattttttgattatcaagaagctcaacattttctcaaactatttatatcctttgcttatttacccattaggcatttattttattcttagtaaagcatatgaaaagtcctactatgtcatagttaacaaaatcatcctcctttgaaaaacaggcttatagtttattgctgtatgtgtctatatttctgaatttttcttattgtagaccattcctcaagaattttgtatccaaggcccaaaagtttgttacccaagatgatgaatgctgacatggatggtatgttcttcattttcttttttgtatactcctggttttgtggatgcttttgctttattaagcaatggaaagggcagagaaaccatgtttagaagactttgatcttggctaattacttatttatatctcatctagtgttagaaaggaccaaccaaagcagcttccattccttagctatgagaggttggcaagttgtttttatcttctttaccttggtggtattatctgcaatttggggatacaaaattttatttcacagggctcttgtataagtcaagtaagaatgaatataaaacattttgcagatttttaagtgctaccctacacaaatgtacctaatgctaattaatagtaaatttgaacctttatattacagcagttgatgctgaaaatcaagtggaactggaggaaaaaacaagacttattaatcaagtgttggaactccaacacacacttgaaggttggcttgcattttgtagtttatttgaatgacagccaattaattgaacttgtaaaaatttatattgctaaattttgtttgttaggatgtataatttttaaaagaatgaacttcaaagtacacacatatatatatctatcttcctgctttggtagtttaaagaacagatacacttcagtcaagtcaaatgttgttattgtgcttccctctttgaagcctaacataatgctggctagtatgagacccccttttaagtccccataatgtgttactaagtccgctttaataaagcttattttaaagtaaaaacaatgtattagccttggagattaaaaaggaattcatctgaattttttcattttctaaatcttgcataaaattaatacactgaaacatcttttgagttttaatgaaattaagaggttgtgtttttggtgccacagtgagcagatcatgtcactcagaacctcccactgatttacattttacagagttaataaaagtcatctgtgacttccctattagctttctttttctttttctttttttttttttttttttttgagatggagttcactcttgttgcccaggttggagtgcaatggcgcaacctcggctccctgcaacctctgcctcccaggttcaagcgattctcctgtctcagcctcccgagtagctgggattacaggcacctgctaccatgcctagctaatttttttgtatttttagtagagatagggtttcactatgttggccaggctggtctcaaactcctgacctcatgatccacccgcctcggcctcccaaagtgctgggattacaggtgcgagccaccgtgcccagccggaattaacctcttatgtgatcatcaggaactgcatgtgttcaatgtcttgataatgttacaatacaagatgataagttgcttggaaactgactgcctgtattcagtatatgaattcagttgtgttaacctgatatatatcttaaacatttctagtaaagatgttatagttttatgttgataagacatgaaccaaaattcacattttaaaaacaaagtctttttaaaaaattactcaacattaatgctatttatgaagaatagcatttagtctaatgtgaaatatctttttaggaatttgtctactaatttgtactcagtttgtttaccttgctgtctctaaaatccgaattcttaaaatttaaggattgtattatttcttttaagaatgaatcctaagaattttgtaatatggaatcattgtcattgttttattgataatgggcatttttattttttatatagatctctctgcaagagtagatgcagttaaggaagaaaatctgaagctaaaatcagaaaaccaagttcttggacaatatatagaaaatctcatgtcagcttctagtgtttttcaaacaactgacacaaaaagcaaaagaaagtaagggattgacacccttctgttttatggaattgctgctgatcattttttctttaaaacttggatagattccaaaagttacagtacctttgtggcttcattgaatatttatgaagataatgtcagatgtagacaaaaataacacaataacaggagacttccataagtttgtgtattatgttagtctatgaaaacgtgcaaatgtattgtagagactttatgattagaattgcatatatttatgaaacttaaagatgaatgttttattgaatttgtaggtttagcactgtcttttattataggattagtaagatatacaagaaaataaccaccgtgttgtgaaaaagtgaccaaaatcatgtactaaatgcacagctttatgtaccctgtccaccatcttgtgcctcttctccatttgcctcttccttcctatttcccttccgctaaggaaaaaaattggtgtcacatttgtaaaagtaattttaatagttaatcatctctgagagtaacctgtattttaattgttgaaacttaaccaaaataagatactgtctcagctagggcttgtcatttgtgtatttagtgttaagataggaatgctagtgtctctttaattaattggaaatagatggaggctaaaaatgaaggtttttctttgaaactgaattaacttgggaatatttgttgttaaaaacttctttttgcccaaaataactcattttgtattatctgaaaatatataatttctggtcatgtgtatgttaaaatagaaaattttgaggaaaaatggaaatagggtggaaaagtactcggtaaacagtagtaaccaaatattttcactccagatttgtgttttctctggcacagagtagatcttttgggaaatatatatgaaagtggattaagtttgactacccttatgttagccacatctggatgagaacagttacaaagagtttggtctctaagttgatttgtacccagtgggtcaacttctgcaaaattccgtaatggtgtattagtattagaatagtgaataaaatgggaaagttatacatgtatacttattatcttgctcagtattttatctcacttgttctagaattttctgtaaaccctgctactgggtttgaagagttttagtcatcctttaacaatttttaaaaatttagcttctagattccatttggtaaggaaatcaatattggaagtattgctaaaatcttataatatgaaaagagatccactaatgtagcttaaggttattagatttgggcttttaatcatggaataatcttatgtattggtgtaagagttgatgaatgactttagctgtgtgaatatataatagtcaaactgcaaacattttgcatcccttttgtgacctaatttacagacatttaaattgtgttgcagttctgctttgccgtttaataaaaagctatttcagaggttgtgtgtgttttgatatagttgcctaagtaaatggggtatttaggtatagtggtgtatccagggttattcaatgccacagaatagtgtatcttatttaagtacccagttactgattatttaggggaataatatttttattaatacaactataactggttatcaatataaatatcataggctattatacattaatttggaaaacaaaagcaaagcactcaaaggatccagtatctccagggaaaaaggaagttgtattttttagggtaggctaagctactttagcaagagacccagtgataaagaatataaatatagaagtttctctcccaaccagtggttccaaggtcagcattgcaggctagcagcccttgttcaaacagttattcagggactttggctgaggatggtgctgccattttaaatcatggctttcaagtcactctagttattcttctaatttgcagaaaaagaacatggaagtgtacatatgcaaggtgttatgggctgtgcctggaaatggctcatatatcttctcatattccagtggtgtggagacttagttacatctagatacaagaggagctgagaaatgtagtccctggctgggaagccatcttccagctataaatacaagattttggtggctgctagcagcctcagccacagctcttcttgtgctaccaagtatcttcccttacacagaaagtaatccctcttcatccagctagtgattcagctcacaatctaggatctctattaaaggtccatccctttacatgtggcttctaatagtctgacaatctctaaactgataggcaaattatttgctctcacccttgctgctgcccatttataatgtagttgggacaggatggccaaataaaaagtctcaatttggaaaatggaataaagggaaacgtaaaaattgtggaatgctcctgggagatgtatgaagattttgtccctagcagtggagaagttccttgattcaactatgattctgatctctggcaggggactcccttgttcattgaactccatggtttcccctctggaaagttactccttatccattttcttccatggctacctcagaagtagagattgggtgttcactccatgggaattgtgaagacagtccacttcctgctggtgtgaatttggtgcccatcattttaaggccaagctcatgtttctgtggaatacgattctctcaaaaactcaagcctttttatcagtgtgcttctgattgcatatgccgaggaaccacaaccaagcttttgaccaaattctcaaagtatgtattatttttgcctttctttaatggaggctatcttgagatcaactaaaaataagattacactgggaatgttacatgcagatcatcactgcaaagctgggttcctttggcttaacgattggtagagaagtcttcatgggcttccccccaatctcccccacctcaaaaataattttgaacctttgctgctattcagacttc

SEQ ID NO: 537 - DNA, 970551 bp, Homo sapiens
  source 1..970551: mol_type = genomic DNA
cccctcctagcatggtgtggaaagggggcagatgggaggcctctttctgaaaccacctcctgttcggcggctgtacttggacctcagtttccctgttttgttcacgtggtcattgttaagtcttaggggacgtgtacagaggctaatattgagccaccaatcagttatttgacaaataccataggcgctctgtgagcaggagctggctcctatcccagaccccagccctgtgacctgctctccactcgcccggggtctttcttggctgggacaataaacctactgcatcaggtgattcctggggagtcagccccgtgctgggctcacacccagcccctctgcgttcatctcttacatgatctcatgcgaccatcatcacacgtccccaggctcctcccgggccaactccagaggcagtgcgtgtcacctccagctctcctcccacaaaaatgctggcctttcagcctccagtgcgcttagttcaccccataaactctgctaatgcttaccacatgctgagcgtcggcgcccgtccccacccccagccccacaggctcccgggtcccgccctgggagaccctcccactggccgaccctgccccaagactcgcccactccacggtgggaaacctgcaatgtgtccctccctaccccgccctcctccagcgccggccaaaagtgaccttggacgcttctacaatgccatatccactcctctgaacaggaggcgagtttgcacccagtggtgcctttggttgctagaaattaaaaacccgattgcgcgtgtttgcaattacggtaacttggcgcgtcacccccaagcactgagctagctggtggtagccgggcgcctctcggggcgcgccctattccgccctcggccctgggctgccgcacgatctgcgcgtcctgctgcacctgagcccttcccactcgggcgcccgcaccgctgcggggccgggcgaggatgcaccacccccgcccgcgagcccgccacgggagcgcgtgccgaatcgacgccgcctgcagtccccactacgggtccctagggggcgcagccggcgcgggaagccgcccgagccaggcgccgcggccggcacaaaattgcaggcgggcgggcgccgcgactttgaaaacaagcgagggcctggggggcgggccctgggagcgggcgccgcctccctcggccaatcaacggcgggcggcgggcggcgggcgcgggcggcgcgtgcggccgggctgtgaatggggagcggcggccgcggcagctgagggcgagcgcgaccgcgacgtgcgggcgggcgcactttcttctcagcgccgggcgggggcggcggcggcggcggctcctccgcgcccggcggacccctcggagctagcgcggcgggctcgggactgcgtgagcgccggacgcgaatttcccccgttgacaacttcttctcgcccggctcgtccccggcccgcgccgcgcccctcacgcggggacccaggacgccgcccctcagcgctgggcggccgctcacctcgggccggggggcgccgcgcctcccgcggagtggccgcgcccgctcggagccgtcccgcctgtcctgcccgcccgtccgtccggcgcggcgctcggggtggcggctgctcggcatggcccggggcgcccggccctcggcggccggtggcggcggcggcggcgcggagccccctgagcgcgcgggccccgggcggccgcggggatccccgcccggccgcgcccgcccctcgctggcgccgcgccccggcccggagccctcgcgaccccgggcggcgcccgagacctccggcggggacacggcgggcgcggggcggtgcggcgggcggcgggcggcaaagttggggccgggccgccgcggctggtgggcgctgctggcgctgcagctgcacttgctccgggcgctggcgcaaggtaggtgcgcgcggggtcgcgggccgggggcgtcgcctcggggcgcggaggcgcgaacttgagcagcgagagtgtgtccggggtccccccgcttcccggcccgggtcgggatgcgccttgctgggggctctagggagcccaggggctcctccacgccagactcggaggagagggaaacggagccccgtagagcctgcaccccgtctgctactttgcgttttattttttttataccgcagtagcacaaacaaaaatttttaagttgaggacccatttctcagctccttaaaaggatgcccgagtccccttcccattgcatggatgaaaaaggggctggtctgtacctgagtcttcgcaccgcagggtctggtttccggtgagtgacatccagaagacttggaaatatcaagtgccagtcgctgtgaaaagccttttccagcccctccccagggcctcgtcctctccccagcccccgcctgctcctgactcccccaagtcccaaagcccgaccccaagtgggtgctgcgcggccggtggagcaaaactttcagtgcccacagcttttgcacttggctttgtttttctccctctattggcttctgtttagaatacagtggtgagctctgaaatagggaaagaggatctgctgaatggaaatgaccttttgaaacgagagatgggatctcttgtgaaacgagctttccttcccaaatctgggcttccctccaccccctccccgcccccgacaaaacccgtaacgtacccctgccagctagcatcgttttcttttgaagtttgctggtctttaaaccaaaacacccccctcaacccagaaataactattttaatacgtcctttggtaacgtctttaaaacacattagtgaactggttttgctgatggtagttttaggaaaattaacttagttgtattccaagatacagctaacgaacaatcatggtaaggaactcgatattctgagattggcgaagatgagagcattaaacttaaattagctgtgttctgtgtcctgtgaagatgatttatgtgtagtaacatgacttaaatgttgtaacattttaaaggtctgagctcaaaactatcatccaatagcttaacaacgaactcatacttttttttattgatgcttatgtaacgttatctaaattgtgcccctccacccccctccagctttcataaatgctccctcttatgttttactacatgaaaacaaattgccatatttctggttaatttaactcctccattacttggaaaattttcatttcacttatttgtgctttttgcttaatgacttactctggaagaaaagcatttattaagtcattttgtacagtgggatctgtagattgttagagcaaccaggttcaagtgaagaaatctaaatcacttaggatgacctttaaaataatgtgtttattaagttttctttttttaaacagtgacttgcattttgcactaagacctgtacgttcatacatttgaagattggtgcacagactgaaatggtggggaaaaaatctgccagtggctttgttttgaagtatattacatagatttcaagtttttatcagttgcactttgaaggttgtgtaaagcattgcattttaacaactgaaatgttaatgaaaatacattttaaaaatatattaaggcaacaaccgaactttgttaggaatattttattcctttttggcagtaaaaacattggtacctgttttacatttatatggcttatgaaagtgtacagatcttttagtgtaaaatttcagataggttgtcacaaattttaagttcattgacgggtttctgttctctttgctctgtgaaatgtgtaatatatccatctttttttatatcgtattgaaaattcatattacagaggagatgtcaccatttgacaaaagctcatgtatcttgaaaatgaaaattctggtgctgttataagagatttctgatgggatgatgagttggtcatatgtgcaggagtgcattctcttgaatcttatcagatgtaacattctaaatggaatagttaccactacgttggagcgcctcctaagtaccatattattacattgtagctaggtgaagctatgactaatttctctgcacctcatgtaagtaggctaggtcgtgtattttgagaaaaaacgtgcgacattgatcagtaaaagttacatttttataacctaggttacagaccctctatgtaactgatcatgatgggaaccgccaggttcaggtcttccaaatgtaactttaatatgccctggagtttcttctttctatgcggtgatgagaatttctgagttgtatgctctgcttattgctgtgtgtttaattgcttgtgactttcccggattcctaaaaagccaagtctttaattctggaaggcaggtggcaacacatgctttctttatgccatccaccaaggagccagctgtgagtggtttggaaggatgacttctgaggctaaagatgtataagcagtcttatgtgtgaagtccgtggtgcctttagctttactgctggactctttacaggcttactgattctggcagtgttcagtagacctcctagattcagcttgcattcctcaggcctagaaaggataggaatgttcttgtccatggggctgtttgttcatagtcctcagtttctcatttgaaattgtctccacttggacctatggttctccagctttggtatgtgttagaatcacctggggaatttgatgaagctgtagagtacctactcttcctcttccatgagccacatttgctttccatgtgattataatacacattggaattcgagaactactcacttattaccttgtgtttccccctattccagacacctgctgacttcctggaaactctctagcccagtgtttctcaaacttggttgcacattggaatcacctggagctttaaacttctgatgcctggatgtcactcctagaattggttttaataaacttgaggtttgatctgggcatcaggatgctgagacaccccctcctccctccaggtgattctcatgtttagccaagtttgagaaccactgctctaatggttttacgtgaggccacatggcttgatttccctttcatgccttcctgggcttattgtcctcccccaacaattgcagtgacttttatggaccttgggcctgtgttcacttacacctgttccaggttcatgatttgaaactcaacagagtacactagcttttcacttatgtatcgtttattcctactgaaactgttgagcccctgctttgtgctgcctgaggtgtacatcggaatcactggtgaaaatttaaaatacagttatctggactccacctcagaccagttggttctcagaagcatgcatttaaaaactcctcaagtgattcttgtatgtttgtgttactttttttattttttatttttaatcctcgtgttggttaatcccataatgtcactcaatttctctgtcatccttagcctgatttttctgtggtctgggtcacttttctcaggccaattcccagccttggacagggtgtactaattaggcatttctgccacttgtttgctagagtgttgagttcactacaaatctagcttccttttgggcccatgttgctttccattaatccagaagtactttgcttcccctcctcctaacctactccctttacaactttgtaatttgagtttcaactggaacttgagttctagactcccttacttgaatatcatcttaataaagagtcttgcttagtgagtgctcagatagttaattaaattttattaggccactgggtatttaacagacaactggtctcttggttggttactgtcttccaaatccaacaataagcagttattaccctctatgcagtctgcatagccacctgtagctgtcctttattgaacctttacgtgccaagcactaagtgctcatttattcttcacagcagctcctgagaggtagacagcatttttgttctcatcttacctatgggaaaactgaggcattcagatgttaactaactttcctgaggtcccaggaccaggagtggtgatgccagaatgaaaagtctgatccagagtctgaacataacttgagttcataacccctgggctggagcgtttcccatgtagcctctgcctttataaggagagggaaaaatgggcagcaatcagatctgtaccaaagggaaagacggtggttgatattttctaaaaacagtattgagtaatctgacctcaagttttagataaaccttatttacgattatgattgcaaaataaaaattacataatttggaaaatagagatgagggatgtatgtaaccccttccatctacacattcgtctcctctaagaaaatgactatcaccattttgatgtattcccctaccccaatttttctttcataacataacatgaattccagcttcatgatggtctgttggcagagattagaccaccccagaatggactactgggagtgcaccaactatttatttgaggaacatttggaaaattcttttatctgcactgaagtgtatgaatttgagtcctttaactaaaggaggtggagtttgtaaggtactgatcttttattagtttgccttagcacacattttatgtaaacagttaagtttaggctatactggggtttatacctaaccagaagtttcctgggccctcaaatactgagataaaacaacgtggaaggctgcaagttaagtgggtaattaagtgatatcaggtaagactgtgtagtttaattctccctaccagttgcctttatgttatttccatcctcagagcccctgtattgcttgtattggaatacataggatttggcgtctaaggtggcagaggtgtgtggcatgtagtgtctttctgcctgcctgccttacggtgtcccagagatcagagactggtaatgtcagctgactgaaactagagaatggaatggacacaaagtgaggattctgattaggtcacggcttaaatttctctaagaagtaaagaaagtggtagttatgagagtagacctccaggtccaaatgcgttgaaagttgaattaagctcaaggtggggaatgaaaatcacattgaaaggtgtagtataaagaaaaattaaggtttatttacaaaagaaagctattgatgttttgttatttgattaaatactcctggtacccaattatacatttaacccaaagtaaccgagcattttaatttgcatagtttctaaaattttatttgacttcatttctgtaaggcattatcttaaatttccccctaagtatgtacacctcttttttttaaaaaaagggcataaacgttcgtagccataatcctgagggaggacatattttgtcagttgggacagcaaatatggcacctcctgccatcctatggtagcaagtagaaagaagctataggttcttcagtgaatccctgaaatgcaaaagtctgtcacagttagatacctacctgccagttattgatcctatacctgagatctgttctggagaggttactactcttagagcttcattatgtgaacagtgttgccactaaatccaaatacaaaaatcatgattattatgggagcattgctgtagggaacccttgtttatgtatgtgcaattctagtgtttaggtggttggcttcctgacagaaagctccaaagccagaaactcattccatcagcctgataccaatctcctgtgggtattgtgggaatgaaagcagtttttataaagctttcctagaaacatggatatagtaaatggaaaagacattgggctaagtatcagtaggcctcgtttatacttcattctgtaactactgtgcaatatgaggaagtctattagtctctctgagtctgttttctcacctataaaaggagggattagactagatgttcagaattgttctactctgattctctgatcttctatatgttgtcttcctttctgcccttcactagagtctgcatgtgtctcctgtctggggattctgtaactccatatgtcttagcttagaacctaattttcttcattttacttttctcagagtatttacaatgttgaagacaactaagatgcaatgtagtatttctccttaggtgctgccgtctaacacatgatatatttactctagcctaaaaatggttcatgttcaaaattttaggttctgtaaaacaaattggtgccataatttatcagtataagcctgaaatttggagaaataaattttcttaaaatgtgagatgcttatttatatacatggctggaagaaggggcaaggctaacaaatctggaggtaattaatgcagtgagaaacttaaaaagatatgagaaaatggcgatggatgagaatgtttatatttactgtacagtgaccatcagtaatgaaagagattagtagatgtctgtttttgtgcttaacataatgttatgttggtttaattgtcttcattaggggcttttagtaaaacaaagggtctttaaaattaacacagtaatttttcactttaacaggcttaactggcactttattgatatacagacaatgtctagtgaagataacagctatcaattaaatagtccaatttcttgaaaacagatagtcaggtaaatctatttctgatttttggagattaggtagatgaacatgggtaagactatagtttctgcagtgtttttggctttggttcattttcaaaaaaattttttttaaatggataaggctaggctttagagttgtgggttcaaagaatgggctagaccctggggtccatattattacgtagaattagtctttgtgcagtgtttggttgccttttctcctttctataactctccatggtattctagacctaattctttaccttgagggggttggaagctctcaagtgtgtaagcttaattttacaacgatgaatagtctttccaatgagaaaaaaatagagggagataaccacgtaatgactatggtgatttggggaggaatatggaaacttggggagctctggtagttgcctttattaagaatagttggtagcaggaattttagcaacccaagcaggctaattagaatatatttcagttttagagtaaggagggattttgtatcataaaggtataacctatcatacttaactaagggtgctgatttccacaggtggtagtatttgtgagtccctctctctggtgtgatccttaatttattttgtgtgtttgtgagcctgttttcaaagtgaaggtcagttttgtcttctctctaggtgttaggcgcgatgcaaaaagaatgaaagagattttgatagggtatgaccaagcccttctatacaatggatgtcagtgttgatttttatacacaaaccaccagatggcaacagaaaaagtgttcatataggatataatctgtggtttccacagccaagttttttttttttttccttccatgattcaccactttttagtatgcttaggtaacatgtacaatttctggctaagagcaaggcgagtttataatacccagctatgtgaaatcaaaaccaggtaatagaatagtggcagagtgtcactagaaaaagattttttttttttttttttacatgagtgtataaactgttcccaaagggagcaagtttccagggatgcaactttgatttatattattgtatagtcatgcttttacttctgattttttttattcagcatttattcagctcttacagtaagctgtaatgatttgcagaacataaaagaaaacatggctgttaccctaaagcattttatgtaacacctttaaaaggaagagatacatgagttcacaaacattaagcatatttatgtatttgccggccaaaggtatttttactctatgtagaatttgttttatttttgccttgtaggcatattccctttttctaagcgtgctgtcttggctcttctaaaatggttgtcttagctaaaactcctggttgcaagctagaaactcagtctgaactacttaagaaaaaaaggattttattgtaggagtcctggggtatcacagtataattaggagaatttctttacatttggcaagtttagtattcacttccacctagggaataactagagccacatgctcaaaagctcccgggtactgtccttttggccatcatctctcagtttgcttctgtgtctgtgctggcatcattctggattcactggaaattgctttctttttgtggctgaaacccagctgtcaccactctttgcattcctattgcttcagaccctcaaagatagacttaaagctttggtgctgagtccaaaatctgtgaaatgatcagatttgtattttaaagtcatcttgagtggggggaataaaccattatttttgttgcaaaattgagaatgggttggaagaaaccagaatgaatgactgtagatgtgttggactgtaacaacaattgaggtgagagaaagtagcagcttgggctaggtggtggtgctggagatggagagaggtagatgcactagagagggatttaagaggcaaaaaatacatgggatttggtcatgggttgggtatggaaggtgaatgagaaaacatcaaaggtgacgtccaggtttctggcttgcatgactagttggctagtataaccattcactgaggttggaccacctctgggcagcatgatcattagtttggttttgaatttattaatgtgagggacctttgaggcatctagacagagctgttaagttgtgtggatagatgaattttgcaaccagaggagggtctgggcttttggtataaatatttgtggagacagtatagcatactgtttaagaggataggcttggcataaaataaaacaaagttaaccacttgctagctttgcatccttgggttggctacttaatcttcattaatcttgacttttcttatccctgaagaattgtgtaatgattctgcctgcttcctgtagttgttgtgagggctgattgatatgattgtaggtaaggtgtttttatcgcattaccaagtacatagcatgcatccagtaagtgttaggtggtgttatttattcttttgtgtagaggaatcctgccttatttatcttttcttttcctgtaatattagggagtgatgagtcacggtagtagagtggggagtatggacagttgacataactggagaggtattatactaatattagcctggctgggatacaacctggataaattgcagggcgatgggcctggggggagagtagagtgatggagatgagttagggaatggttatgataatatagaaataatatttgaactgcagtagtattgggatggaaaaaatggaatggtcagtcttgcttagagaggtaaatagatgagaacaaaaggccattggatttgttgattacatgggtaatggtgatctttttgagctcaatctcactggagttctaggagtataaagtagattgaagttcattatggaatgaatgggtagggagaaaagagtcaaccggtatgttcttgttctattgaaattctcaaggaaagagaactatggaggcatttgaaatgcatagtgacaaaaatgatcttaaaataccttgggaatattttttccaaatttgaaatctattattgaggctgggaaaaaaaattgtcatttggcagaatggtaagtaattatcacaattctctgaagtgatcatttctgtttcatatgttgcgactcgtggaggcttctagcaacattgtcaccaaagctgaatgtggaggactcccttcaccaccctgctataaacacacagaaactgtggacaaaatataacaagaacaaacaagcgtttctgaagtttaaaataccagggaatccctaggtgccagctatgaacagaaaattcagagctagggcgttaatcaggagctcaaggcctgtggtggtttctgatctgaatacacgccccaatggcttagtcctgagggtctcatggaggagtaggaggcatggccttgggtctgcatagacttggaaggtggagtaaaggttctctagcatcaaaccttgaagggcttttccatctgtgaaaagagaactagaaaaactttgcctactggtttgggaaagtgtaggaaacttgctgtcctcctggggttgtgatcattaggaataaaaaagggacatctaaactccaagattgcacctcataattggggtggattcaaatttaacatttcttatagtgcaactaaccttcaagctgagacaaattagcataaaatctggtctagaactatggaaatgaatagagccctcaggtctgaaactgacctgcagagcaaattaaaaatctaagactcttgcagaagaaacaagtcatgctatagatgagcttgcaatacaaaaattgcccagctacacaaggaaatgaatcaccgtgaaggagagttagcagatgaatagtattccaggagattgagatgataggatatatgaaagagattaattgcttaaaattatgagagatgaaaggggtaagatcataatgaaagagcacagattagaaaaataacatggagttggaaaagaacccagtaggacttctagaaatgaaaataatggtcattaagtgtttttttttaaaaaaaataacctcaatggacaggttaaagagccaggtagatataattgaagataaaaactgtattgaaaaatcaatagatttttaaaggagatctgaggaaatttcttcgaatacagtaataagggataaagaaatggaaaatgagtggttacaattcatgaactttagaatgaggaagtctcatattaccttctgtgagcttccagaaagaggaaatagagtaggagagacactattagaagatagaatggctgagaagttttcataatcaatacaagttctgcctgagctcttagtttcaagaaccgtagtaaaccccacacaggataaataaaaataaattcatacctagacatattgtagatgaagccttagaaaataagaggaaagcagtctgaggaaagttgatgtctagactggcaggcattttgttcatagcagaagatgattgaataataacatcaaaggctggaagtggaaatccactaccaacctagaattccatgtccatataaagtattatgatactcaagagtaaatgaaatggctgggtgtggtggctcatgcctgtaatcccagcactttgggaggccaaggtgggcagatcacgaggtcaagagatcgagaccatcctgaccaacatggtgaaatgccatctttactaaaaatacaaaaattagctgggcacagtggcatgcacctgcagtcccagctacttgggaggctgaagcaggacaattgcttgaaccctggaggcggagattggagtgagctgaggttgcgccattgtattccagcctggcgacggagcgagactccatctcaaaagtaagtgaaataaaggttgtagataaaaaacaaagttgatgattagtagttggaactactaaaaaatgcacttcaaaaagaaagaaattgaacccaggagtgaggtacagattgtaaagtgctaaatgataggaagcattgttgcaatgtgccccttaaatttatatgtaattgctttgcagtttgagaaaagtgtcagcagtttccactacaagtactcatactgcagattaacggattagcgagagtgtaagcagtagggacgggtttgggagatgttggtcaaaggatacaaaatttcatttagaaggaataaattcaagagatctgttgtacaacatggtgactataattaatgataacttgttttattcttgagttgctaaaagtaaattttaagtattcctaccacaaaaaagtatgtgaagtaatacatataattagctctatttagccatttcacaatatatatgtgtcaaaacatgtcgtacacaataaatatatacaaatttttgtcaaaattttaaaaatgtatgtgagcaggagttaattcatctaatgcctcagtgaataaagtgctgtgttaaaggtatagtgatcaataacagttgcttccttcagagagcttatagtttattagggcatacacaccaaaaaatacagcgccaatgtgcagatgaccctggagagccctttaagccatacaggggattcagcatctggtagataagtgttaaataggaccctagcagggatacatataggcaagccatgttggaatctggggactcagattggcacgtggaaatacaaagatgaaggattcaggtggaaagctgctgatcaacaggagtgaggaacccaacacctagatcagaacaggattcttgccaaaggaccaaacatcaagaccttcatatttagccagtacattccaagtgacctttacattctgaattagggtcttattgtcatagctgtaggaaatgtggacttggatcttggccagcagagagttagattaaatgtgcagggtgaagcactgttcagagctgagataaagcatacacaaagaggcaagtggttgagatggagcagctcagtggatgagagttagttacagatgagattgtagccatttgcatttttgtggcaacttgatatgattggttgatgctcatcaattcctgaattttgaaaattacttatatctgtatcatggaatgttatagttggaaagacagaggccatctgcatctctaactttgctgtcttctgtggaatgaaaagcatgaaatataagttgtgttatgcttttatatagatgaatacttcatagcaattaaaatattataatctagtgttttattagatgtagagatgccttaagaggttttattttaaacccacaattgctttacttcaaaaattgctctttcttgggtgaataacgtgaatttcatcatacatcctattggcaacaaaaacttttttttttttaaaactaaacctcatttggcctgtgaattgtcccaaatcagccagtgaggaaacattgggagtcctaacccactctgactttttccttactttagggagcaagctgggttggctagagtcctccatccctatctgtgttcgtcaacagcaggtgaccttcacaaatgatgaggacctgaatgcttctggtggctttcacagtggctgatgtggcacatgagaagactacaatgttagtattaaaaaggatgtttagaagtagctctaattgacatggaaggatttctgaatatattaggtgaaaaatgaggttagagttctttgtagagtgtactagcttgtttttacggagtgcttttcttggcatcaggcattgtgctaaggccttcaagttatacagtatcatacatccttacaaccctattttatagttgaggaaattgaggtccagagaagttaaggtcactcacttcataagtggtggaactgatctttgagtgcacccctgtctctggagcccctgttcctagtcctctccacatgaacagcccttcctgggagtctccaagtaccagctttctctgacatagggtcacgcatgcacatgcaagtagaaaagggtgtggaagtcgcatattataaaacaggtaagaaattactgttttataatatgatgcagtgagtatgattaagaaatagaccagcctacttaatgtgcttatctctgttatagggatttctctttttttcctgaatgttctaagttttcaaacattcagcatttataactttttaaaaattatgaaagcaattagaattatttaccataatgtattattactggattttaggaagaatatggtactaaagttgtttagtggttcagactgagagtgcattaatgggaacctgggattttgtttgtttgtttcctatttgagggaacttgaattattgttttgggccttattttgttcatctgttggaaaaaagcatgccatattttaagttacaggctcattataagaataaaaaactcctttgaaagatggattgataaacacatttgtaccatcgatttctggttagtgctgtttaatctttatgattctagtgtcaaattctccccacaactctaatatagagtcaattcatacattcaagttaatggtagatggtagatagtatgcataaaaaatttgaggcatgaagttgtaaatgaaaattaggactaaatttaaatttaaatatacataaattttgtatttaaaactttcagtacagccatgtaccctataatgacattttggtaagtgacagactgcatatataagggtcctgaaagattataattctgtatgtttatggtaccttgtctcagttcagatttgtttagacacataaatacttgtggtatagttggctcctgtgttcagtacagtaacatgctgcacaggtttgtagcctgggagcaataggctatatatcatataacctaggtgtgtaggaggccataacatctaggtttgtgtaagtgatgtctgtgatgttcgcacaatgacagaattgcctaatagtgcatttcttagagcttatccccatcattaagtgatgcatgacctgtatattcaatataatataaatgtaaattggagcattatgtatatatgctgtagtgtagtaggcaacaattgggtagtgcttggatcacagaaatgtgccactttctgagaatgccctagtagatgtacacagcaggggcctcactggccatttttctgccatgtcatctcttggcccttttttatggagctctacaaatcactgcagcgtggaactggttcttgcccatcccgaggtttggatgttcagtttctcctgaagtctacagtatttgttttcaattgtatcccccttttttgcttaaactagacagaattggtgtttttgggcaaacactatttaaaccttttaaaaagggtctgggggtctgggtactgtggctcatgcctataattttggcattttgggaggctgaggtgggcagatctcttgaggccaggagtttgagaccagcctgggcaacatggcaataccctgtctctacacaacgtacaaaaacttagctgagtgtggtggtgtgcacttgtcgtcccagctacttgaggggctgaggtgggagaatcacttgagcctgggaggtcaagtctgcagtgagccatgaccgcaccactgcattccaacctgggcaacagagtgagactctgtctcaaaaaaaaaaaaaaaaaaaaaaaaaaaaggctatcatgggagtgcttaataaacattgctagcaatttcgaatcctattttacataaaagattatagtaatttttaaagtaaggtttttaaggcaagcaaaggaacatgtattgatttctgagtatattgcacatttaattacaacaaatgaaactggtcatcttgtgtttttatttttgttttcatctatctgctttccagactaattggggagcaagaattccttttcctttccctgtttcctttagatgattctgccccttcatcttcgctcctcatttctgtagcttgactttgttctgtagctgtgtgctgttccctgggtgcctgccaggagggcgcttccttctgcctattcctctctccattcattgactatctttaagtggcgttttttccttccctacctgtattaagattttctacttgcagactcttctcccatgttcacaggagctggtttttccttgttgtgcatggaagcacctttggttcatgtttaggatatgagcattgttgacaggcactgttaacaggtgaaaacatctcaaaaggatgcttgattaaaataagtattttgttgttcataagcctctttatttggctttggtaaactaggagcctaaggtaacctttcattccagttttttaagtttttgtggttatattatgcagtttttattatgcagtgcttatttcttatgacaaaatatgagtaggttaaattcataccatatcaaaatgtagtagtgaaagtctctacttttctgatcctcagccccctagttccccctgcttgaggctatcactgtttccagtttcatgagtatttgttcgctgatattttatgcatatacaactatatatgtctttccttgcaaccctttgacattatacagatggtagcatactcttagcttggaggctagtcccagcgcatttttcgcctatattgtgtcttagagatcatttcatattagcacacatgggtataccttgttacaaacatgcacacacagaaaataagctttaaagccgtctgctgtagtgcattggcattataacatagtgtcatgagtcgtagagctggattcaaatcctgaccctgccatttaagagcttgtgaccttgggcaagttgaatcacttgtctgtgtttcaggtgctcatttgtaaagcagagttaatctctctctcacaaggtttttgtaaggattagaggagataatgtatgtaaagtatttagcacagtgtcttgcttaataaatcatagctattattgtactcattaatttatcagatcaaatgaacccctaatgtgtttctccttctcaactgaaatacacagaaggcattacttattacttgtttcgtgaccttttgtcttaccttggttgtccttttcttccaattccatagtttatcttctctcctacttacctcctgaacttatccccaacaaatgttacatatttcttttactttttgagttttcttggcctgttgatgaatatattgacctagcatagcccttgccattgcattaggtaccatcattgttggttttagtactagaaaaactcaacaaagaaggaatattttcttggtgatgctccagagtgaatttaatattgacaatcaaatttattcaagtcactagacaggatgattccttttgtgattgggatttcagctgggatagaactgagatttggatacagatggtacctggcagacgggaataaatgtggggctgaaatgccacagaagcagttagcagtgtgggcctatctgggggtggcctgaggaaggacattcatgaggggggagtaggtggggatgggaaggacaaaaaaccgcattgttaaattaattggcatgacaactctggcagtggggcctcacggagaatgaatgatatgcagggtgtggtgtatgtatgtgtggaaaatagaaaaatgtggtgtgtagaaactggaagaactgtctccctgggttattttaacgttctgcttcagagtacaagcagtttagctgtgggaagcccccacccttttccacaggagagggatggctctcatttgacacaagctgtcatgcttgtaggagtcaggattgttgcacccagaaatgcttgtggagggtcttgtaaggggttgagtgcctgtaagagcatctgggggcttagaccggtggccctcaaggtattaattccttatcagtgtgttcccatctacacccatggctggtgtggcctaaccaagctggcttaccttttagaagtttctttttattatctcctcaagagtacatgctctggcttcttggcctggcaggctttcattacttacatgatacatatatgtactctttgataatcttatgtttttgtcccttgtaagtttctgcaattgtatactgcattgatgaaggagggtctgctctcctctcccagggtgtctagtgatggcctgcatgtctctggtctgtttattgccaactcaagtaccttttttgccattccatcgtgaaagaaatcaaaatatagcattttgaaatacatttgaaatgttctgtttaaggatttcactttagttatactgtttctactttatattacaaatctggtttcctcttccatttgcctatatctaacccattcttagtctttttttttttttttttgcatttgcttttctgaaaatttgagcattgaaagggagggcagcttgatcatggaccagggctttctgagaatgcgaaaaaatgaatttcaccttgccaaatagaattgcctggatgtggtggagggatatgatgaggcagaatcacaattcttctacacttttgaaattgttctccccaatttattccccctttcctcattctcttctgatgtatgggtttaggaagctccggatgactgtttcacacacgcactcccctctcattctctcctgcccgtccttcccaccgcacacatgcgctgaaggaggtgagcattctggagacctgagtctcatttccagatatctttgccatcgtttgcagttacagctttttttttctatttttttccccctatctcttgtaagttctcatattatacatactttgaactgtggagatagccacaagtaaaataaaagtatatgtttttatattctatggagtaagaactcatgttactatagtaacatgctgctctgtagcagtcagaattgtgtatttcagtgtcagagttccctgttaaaaaattagccttaatattgatttcctcctgctcccaccttggttggtatatgaaaaccctaaagatgaagcatttttaactaatttttgttctttacacataatcagaaatcaaactaaatccatctgtgatgttagcttatggtctttctagattttagccaaagatcttgtatattttaagcagttgccctgttttaatattaatcatggccatcccagaataagtcctgcttgacacagggcatttgttcaactagttatctttgttaaaaaagaaaataccataagaccagtcatattttgctgcatctagagtgagaccaaactttataatatagtgataagcttgaccaaaaaaatgtttaacaattttggtatgtttcaggaattggagaaattagtatgttggtactgtaaggaaaaatgtgggttaaaaaaaaaatccagctaggactcagcagtcttaatttaaaccttgtgcttgacaaaaattgaatgttgcctgtatactccagacacaatcgtgaagctcagtttctgtatttttcttctgaaatttaacttctgctaatataacataggatatgtggatgtcttgcaatcctaaaattttaagatatttcagggcttatcaactgaaggctcttgaaatgaaaactactacatgtattcatcatacgtgaaataaaatctttttgaaactaaaaatcctttaaaaaattcacaagcaagatgatactatagaatttcttttgacagattccttagaaacgtcaaaatcaaagtgaaaacaagttggaaaatcctctttgattttgctgggtcacttaatttgagttgatttcttcagagcacataacgtttcttaaagtacagtactaatgacagagtcccaggtggccagccttgtgagctgcgaactttgtcctgttgtactacctctggctctagagactcagcctaggaatgtgaattggtgagaatatgtcagaacctggcttcctattgtaggaactcagtgcacttatttggttgatactgagtcgctataaaaatcattgacatgaatgacaagttgtgtttttttccccaacagttaaagacattttacatacagtatgtgaagttactttccaaagaaacattcttcatgttttcgcaagtttttttttaaacctaatatttaatgcaatgaatgtgggttggtttctcttcttccttcttccttctcctcctcctcctccccctccctctcccctctccctcccatcccctcccccctccttcccctccctcccttccttccttccttctccttccttccttccttccttccttccttccttccttccttccttccttcctccttttctctctctctctctctctttctctctttgtttccattgtaaacatatttgcaggattcagaggtgaaactgtagcggaatgtatacacagaagctctgcttatacctttgttcccccagcctgtttgccctctccctctacaggtcatcatttttattagcttctttctaaagttttttttttttttcacttaggtgccacacagcatcgagtgaactattttaaagtgaacagttgagtagtgttgaatacatccagagtgctgtgtgatcaccacctctagttccgggacagtttcatcccccaccaaaggaagtcccatacgtattaagcagcccctaatgaccatccacccgtgttctgcttctatggatttatctattctgaatattttatatacaggaataagactttgtgtctggctgcttttgcctggtgtgatgtttgaggttcatctgggttgtgttttgtcattacatcatatctttttatgactgaataatattccattgtatgtatgtgccacagtttgtttatccattcatctgttaatggatatctgtgttgtttccaccttttggctattgtgaatagtgttgctgtgaacatgtatgtgtgtttgaacacctgttttctcttctttttggtatatgcctagaagttgcattactgggtcatatggcaatcctgtgtttcacttttcaaggaaccaccaaactctctcccacagtggaaatggaacaatttccaccaacaatgtagaagaattccagttggtcagattgttgcctacacttactttccttttttaaaaaaaattcagtggcattcagggatcttcataatctgagctttgttttcctttgcagtgtaatctcttcctggtttcacatgccactttcagaatactggattatggtaattgcactcttttgctcccttctcttcacctaatgtgttgtccccacctgcccttttcccccacccataagaccttgtctctgtctctgtcgcccaggctggggtgtggtggtgtgatcacagctcactacagcgtctacctcccaggttcaaacagtcctcccacctcagccttccaagtagctgggatcacaggtgtgtgccgccacacctggctcatttttgtttttgtttttgttttgccatgttgccgaggctcgtctcaaactcctggacccaagcaagctgcccatctcggcctcctagagtgctgaaattacaggcgtgaaccaatgcaccagaccaggttttgcccttttgtttgcaggtccctttaactgtgatgctgtctcctagcccccttcccccactcgaccgagggccaggcaaattccaactcatttgctgagtttcagtcttcaccaagtctgtgaacttcaaaagacgttattcattgttacattccctgcatccggcacagtacctgatgtctgatgggaacccaatacatgtttgagtgaatgaatatgttgtataattcttttttctttatcacgattgctgctggtgccgattgaatttccagagcttgctgtaaaagataggaagaaaatatgtggtaacattggccagtgtttgggccataagatgtgtagaggttctaaggaaaaatacacttccaaactcattcacattgctggtcatgttcagttcctgtggctgtaggactgaggctcctgttttcttgctggcagtcagctggggccacacactgcttctagaggtcaacttgaattccttttcgtgtgccccactccatcttcaaaccagcaatggtgtgtcaggtcctttgtatgctttgagtatttctgacttacgtttttagttggagaaactctgggttcatgtacctagatcaggtccaccttaattatttccctgccttcaggttaaatgtgctgtagaatatgacattgtcacagaagtgagatctcatctttagttacaggttccagagtatggggcagaacatttttgaattctgcctagcacagtgtttatagtttattgatctgtagataggttgggtaaaggttcttcttcagccagtaaaatgtcatcttctctgtcttttgattgcagggtttctattacctatgtccatttctttaagccgtttggtctcatattcctctgtgtgttacaagaattgtatcatgttatctatttcatgtagaagtaagcatgagagaaatgagtgtaaatgggctgttggccctcacagtaaaatctggtatctattctagggagatactcatgtttttctcctttttcacattgctgtcgtagggtcagattcatttttcatggtcatttttctggttctcttttagcatttgaaattgagtagattgttttgattgtaagaatgttttttaaaagtaaatttttattaaaatgtatatatggaaaggaagacaaatagtatattgcttgataaattttcacaaagagacatgcacatgtaattaatacccaaatcaaagcattagaatatttactagtaccctagaagccttacctactcaatagctcccttaaaggcagttttttgcttgcctgttaatttgatgaactttcagcctttgaaaagtcgttacaaaaagccgatgtgtaaaatgtttggaggataggataagaataggaggtggctcttggaagtttgtttgctcctgagtatgggacctagtgatcaaagatgaagtggaactagatactttatcttccctgtaataggaaatacactcccattgtataactgtaatttttactcataaaaatgggttttgcactcaaagcaaaagtaggctcttacttttactgttaaaatagaaactggaaaactgttctttagaaaagtcatcctaatgggttcaatttgaggtagttgctggtttttatatttttatttttttgaccagtgctttaagtttttctcctgtaattttattaaacctatgcccaggaaaaagtaaacggcaagatttcagaatctgaaagtttcttacgtttgaaagaaagtcctcccatgcttcatttttcctaacagaaggtaaactttccatgctgaacttgtctctatttttaacagaggacaagctttaggaaactgtattcaagccacatatagtgtggtagattctggtggtggagcagctattagttatgtttctctggaactgcatttatcatcactgttaccaaaagcatcctaggttccttgggaagaagatcttaaagttctctaccaaaccactttttttttttggtgatgcttcagtctcacaggtgatgcttaaaacacagattctgatgtggagatttgagatcttacaaccatagaccatatgttaaacattgactacacaaggattcgtgatctgagcattaatagcctgtttttttcctaattgcatgttttatagtaatcctaacctttaatatataagatcctaacctttatatttaacgtcttaacctattgctctgtatttctttaatgccatggattattgcttacagttataaatgaaataagtaattttactttatattttcattgatattcaacgaataccaatttaaggagagaaacatagatatacttttaaagaatttaagcgtggcacttaagattctttttattataataagcatgtgaagaagctctttttctgtaatcctagttcccaggggccaaaatgatgattaattacagacaataggtttataaaagtaaccgtttccatcatagaagtgtcataaaagattaaagggtgtatcaacaaaatgaaccagcttcctgtgtaaaattattaatattgctaaataatgtagccttatatctgttacaaaagtaccagaaaaattgctggataatgtgttacaaattttttacaaattacatagataatcctcagttctgttgaatttctctgacattctgctcaactagtttttcctgtgcagaaaaatcttaacaggttgatgttacaggaaaagtggcatgcttttagaaaccatgactaggctgcctgaatcaaacatcctcccctttgagaggcctaggaaagaaccatctcgcttggttgtatccagggtacactctcatagggataaagagccaaccaaataaaagggcagacatatacttagctgtacctatctatcctaatgtgtgtatatatagtgaagctattgtacaatatttcttaatgtaacttaataaggtagttagttttttagcctcctaatggcttagtgtttataaaaatgatactcgttcactgcaaattgtagagtatataaaagtgtagagaaagtagaaatcaacagaaatccttttccctcgagataaccgttgtgaacattttggtgaacatgtttctagaaatctctatggttatatacatatgtaaaagtgtacatatctaatgggatcaaattatatgctgttttgtattctctcagtccacaacttgccagttttcaaatctgtaaatgtagatatatattattttcaatggatgtatgctcttccactgtgagtcatagtttagtttactctgatatcactagacattgaagttgttttagttcttcattataaactatgctatgatgaatacagttgtctggtaattctgttagtttagggtaaatactttgaagtaggattgctggctcatacagtatgtcttgtttcccgccacagagctgccctttggaaaggtagtgttagtttacacatccactgagtcctcattgctacatcttctcaccaacactgctttctaaattaattatttcaattcatttattttttatttaattttttatcatggaaaatgtaaatacatgcaatggtagagtatgcatctatcactcagtttaagtaatttcaactcatggctaattttggttcatctacatcccacctgttttccttcttttcattttgtgaagcaagaggcttctcaggctgtcatttaacctgtgatacctcacttttatttacatctgtttattactgaaatgagtattttttaaatatacttactgggtacaaagtggttataaactttaatagtgagttaattgattttcttcctgtgggtttacaccaattgcaaaagtgtaatttagctcttaggttgaataatcttaagctgatttaatcttaagtcagatgtaaagataatgttcagttccagaaaggtaaccagactctgagctggttaggtagcagctgcagcgtttggtcctgggtgtgacatcttaagaagaatattgacaaatgagcatttccagaagagagtgaccagcatggtgatattagagaatagtgtcacacagggaatggttgaaggaaccaggtggggatcttcagtttagagaagacagaaatttgagggaagaggctgatgaatggagacagctatctgcagatttgtcatgtggaaggtttcagggataacaaggaagaagctgctaattaagtagcaataaattttatctcctctctggctgcttagcttttattgattttatttatatacagctgctggaagcaagcgactggttttgtgattaaaatgatgcttttgggtttctaggaaaccctgagatgatctttgtcaggttttacttcacatacccatctctccaaacagggatttagcgttgagatttaaagcggttttgccatataagaaaatatttttcagtagagaaaaataatattccaactgaaagctgtccagtataggcccagaatcccatatctgtagttccaaaataaaaaaaaaatcctgacagcagaatgtttcctaactcatttagaagcaaaacttgacctgaatgactgtgtctttatttatcctacttgatgtgaatattcatacatttctttgcagaaatagtaatgtgtttgattacggtatgcttttccataccccaggaatattatgtaatgctgtaattacccatcgaaaactcatgtctgaattcttaacacttctggcacagagggtgtgtatacctatagttgtcgttctgtcgtatgttgaattatatgcggtgtattttgataccctatcactatgcatgtgtaaaaagggaatgatagtgcttttcctgtttgtccctctggaggctgtgaaaattagattactatgtggagcatattcagaatagaactgcctaaaaataacgtgttactggtatggtattcttattctgtgtgtgtttaactttctgcccgaagataattgggaagaataatgtggaaatctgtagttgaaatattataactgttgaacaaagagatgtcttccagaggcaaaatgacaaatgatatttaaaaaatattttcactttatccaatctgattagtatattgtggtgttattttgaattatttgaaatgaagtaatatatcataaaacagaattaggcttattttaaggtctacacttatgagctcttacaatttgcttttagatatatatattgaagttacttgtaaatgatgatgatgatttcattttagatcatgctaacattctagttcagatgatctgggttgcttgtattagtgtggcaagacccaaacttcacacagaaaggaaaggcagtatgatttctaaaatatttacttatatatataaaaaaacttggttaaaatcaaacagcagaaaaatgtattacataaaagtctccttcccctaatccttgtactcaaagataactggtatgattttttttgtgtatttttttcataaaatctttttatgttagtatatatttcaaaaattcatacaaataggatgatgcgctctccatttcatccctcttttacttatgtgccttagaaatctttccatgaccacacacatagatctattctccttttagtgactgaagtattccacatggactatacagttcagttagttcaggtcatgggctgttaggttgtttggttgtcttttttgtttgttttaaagtaagtagaagtgatcatgcagtgaacaactttgtgcagtttgacatatttttctaagaaaatcaaaaggtagattcctagcatggaaatgtaaggaatcatttaaatatactgataatgctggattacccaaaccaaaggtctcatcaatgtagtcttttacgatgttcaccgatgccgtttatcccctctcttgctactgctagacattatttaagtaggtacgtctttaaatgcatttttcatttaaattaatttatattttgttaatgacaaattaaatttgaagaaaaggttatatatgtatgaggcatatcattttacattttgcagataatggttggtactcatttaagctcccaaaactcttggttctaaaccacgtccatgaggcactctttgatgactctggggaaaagcagattctttcctctcttctcattttgatctccttgggaggaaacaagctcctttttcacatacttttttgaaaacagctttattcaagatacaattcacctaccatataattcatctattgaaagtgtacaattcaatagtttttaggatatttagagttcagagttgtgcaactctcagtagtcaatttcagagtattttcttctccctaaaagaagcctcacccttcttagctataatcacgccacatcttcacaccctaccctaggggaaccattaatctactttgcgtctctatagatttgccttttctggacatttcatataagtagaatcatccgggatgtcatttttgactggctgctttaacttggtgtgctgttttccacactcatccattttgtggtatgtattactacagttggttctctgcattggtgcattctacatctggtgttcaaccacagattaagaatacttaaaaaactgcatctgtactgaacatatgcacacttatttttgtcattattccctaaccaatgcagtataacaactacttatatagcatttatactttattaggtattataagtaatctagcgatgacttaatatatgagagggtgtgcatagcttatatgcaaatactatgctgttttatatcagctacttgagcattcatggattttggtatgcataggaggtcctggaaccaatccgctatggataccaagtagatgtctatacttcattcctttttatggctaaatagtatttcattgtatgtatatgtcaccttttttttcccatttaccagttgattaacagatatttgggttattttcactttctggtgtctgtgaataatgctggcacatactgatttcatgtggacatatgttttcatttctcttgggtatgtacctacaggtggaattgctgggtcatatagtaactgtttaagcatttgatgaactgctagtttcctaagtggctgcattagtttacatttccaataccagtgtgtgagggttccaatttctaacacttattttccttttttaaaataatcatctcctgtggtttaaatgtgttccctaaattttatgtgttggaaacttcaccctcaaattcatatgttgattggaggtgggcctgtgggaggtaattaggattagataaaggtcatcagggtgaggcctccatgatgagactgttggctttgtaagaagagaaagagatttgcactgacatgcatgtgtttgcattgttttgtcatgtgatgcgtcttgccatgtcatgatacagcaggaaggccctcaccagatgccagtgccatggtcttggacttcatagcctccagaaccatgagctatgtcaacttttctttatgaattacccagtctagggctaggcacggtgactcatgcctgcaatctcaacactttgggaggccaaggcaagaagactgcttgagaacaggaattcgagacaatgtgggcaacataacaaaaccatttcgcttaaaaaaaaaaaaaaaaaaaaaccaggtgtggtggtgtacctgtagtcctatctacttggaaggctgagttgggaggattgcttgagtccaggaggctgcagtaaactttgatcctgtcattgcactccagcctggatgacagagtaagaccctgtctcttaaaaaacataaaaatagggctggttgcagtggctcacgtctgtaatcctgcactttgggaggccaaggcaggtggatcacgaggtcaggagtttgagactagtctggccaacatggtgaaaccccgtctctactaaaaatacaaaaattagctgggtgtggtggtgtgcgcctgtaatcctagctacttgggaggctgaggcaggagaatcacttgaatctgggaggcagagattgcagtgagccgagattgcaccactgcactccagtctggcaacaaagcgagactctgtctgaaaaaaagaaaacaaaaaacaaaacacccagtctatggtgttctgttacagcaacagaatatagacaagtgcatgatcctaataagtgtgaagtggtattttgtggtttttacttgtacttcctcaatggctaataatgttgagcatcttttcatgtgcgtattgtccatttgcatatcttctttggggaaatacatatcagatcctttgcccgttttttacattagttgtcttactgagttgtaataattctttttatattagatataagtgctttatcaggtatgattttcaatctgtgggtcctcttttcactttcttgatggcattcattgaagtgcaaaagcgtttaattctgatgtccactttatcttttgttgtgcttttggtgtcatatctgaacacaagtctttaaaggatgaatttgcttggtgaaacacctttcctttggataccaggttcataagattggacacagtcaacatttttttttttgatctcaatcacttattccttgaagataatctcagatgcagcttattttaaggcagtcccaattagttgactttcagatgtgttatttggaaatacttttaaaggtattttgataagaaaatttaagttttacaataaaatgtaaccttgcaatgtagctttgcattttatggtaaacattagttactgcttactttacaggtactaaaaatcaactacttcaatttcagaatgtaactttctcatgccttattttatttcgaccagtattaagcctctttatgcttagaagatggtgttgaatctgtttcaggttaaaaaatactttattcaaactattattttcttaaaagttaatatgtctaaagtttttgaaagacactgatcactgagatgtttggagatttaaactggtttatttttggttatccatggaaaactttaaaaaatttctttattgaattatagttttaagtctccttattttattctcgatgattaatgtacagggcgtggcttacttataagtgtgactaaagttgtgcaaattaatcctagcagggctccatcctttaatgtcagtgccgtcagttgttctccccttattcctattattctggcattatatcttatctgtatgtaaattcttattctgtgggtgaaaagggatatggttcaacaggatccaagaacttaaaaattgccctttttcacatttctcataagtagtaagtctcctaaagcgaagtcagagtcattataaaggcatgataatggagtctgttatctatttggaaaaacaacttttattgccatttataataaatgtaaatggcctgccatttattttagaattactctgtttctaggccctagaaaggctctgcattttataattaaagttagtagaggctagaagaacttataggaatgtcataatgtgctgtaggggacagtgatacttttaaaggttctgacattcagccagtaaggtgcttctagttccagataacttcttttccccccaggaatagatacagaaaatatttttggtaaatctgccaagttttttatgtgattctcattatgttaaattttattatcagtgcctaaataatgctaacattttaagttaaacagttattcagcttaccactttgacattaccactgattagaattgaaggctaagttgagcctggggaacgagcctctttgtccagaaaagggctcttagatttttccctgtcagtgtattgtaaccttttataagggcagcgccaagaaaggagaagctgctacttggggcattgtgtttgactttggtattctcacaggtatgctgtctaggaaagagttcaggtctcctgcttaagaaattgggaactaggctgcttcctgtggttctgttgctttgtcgggggagggagggtacctgatttctactgaaggccaaaatgcagagtcaatatggccggttattggcaaaaattatgatatttagaaacttttggaatgtctgcaatgttttctagacattctagggaggtcactggtgtttggaaagtacatacaaatggtgtatgaaaggagtgtgccattttctgcagaggtgttcgttacatttcataaccttatgttgccatttaatgaggtcaaagaggtttcttgactgtgactatggaatgcttatcttttgttctgtcttgatctcctcctgtctgtgtctctcattatctctgactacttgtatgttggcagtggctttatttcctttcacactcagcctggattccaggctcatctctaactcctacatcagaaccctgaactggcttgtctgttttgtaatctgccctaccatgcatacccctaacctagcacaaacgccctacccttcccttctcttgtacccatgtggctcagcacttctggataaattagaacaactttgacgatggtattggtcagggttcgattatcgaggacagactctaattcttcctactttaagcagaaagcagtttattacagggaattaaatttcttggtgaattgttgagggtacttagaaacgctcctagcaggttgtgctagagtataattcccaaggctgccctgtggaactggactgccagggtggccagcatcctagcccaggcatggggctgctgatttggctgttgctgctccactgctggccccagaaccacaccaccttggccgctgtccacaagagtaaagtggctacatcacacttagtttctctccccacttagttcagtttcattcttaacccagttggaccataccatttgtgttttgcatggttcatgtttatcatgatctgaaggaacctaaatctagagcagaaccccaatgtggtttttcagctttccagactctgcagagctagaaggtgggagtagattgaagtgagtcaatctgcagtattttccacatttatggtttccgagtatagctggctcttcaagattgttttgtagtcctttcacctttccttgataggttgacttgtttgctgatgaaagcagcagttctcattctacgctggcctctttcattctcattagatggtggagcctacgcttgagagaagaagctgtcgggtacgaactccacttaattgtcctcctgttcttccctgccgtccctttcaaatgaccacaggtagctgtcatagccccgtagagagtgtgagaaagcacaggcaggagtcagcaaggttgctgggaggactgaggctctcggaggtggatcctggaggtgagagggccaggtgtgaggacaggagcacgttccagaggccccacgacagcctcgcccagcacatggcaccattcttcacttacaatccagggcactctactttcctgtcttgctggtggcagctcattctgttcccttcgttgaatcttcccttcctatcctcaggttcagtccttattctgttcttgacttctctttgtggacaatctccttagtttatctctagcttcaacctttcccagaagtctagaggtatatttccaatggtcggtcatcttagatagctcataggcttctcacatctaatatgtttgaaaccactcttgatttttcttttttttcaaatctctctcacttagtgtctcccattttaataagtggctttatcatttacccagtaactcaggccccaaatcttggagttatccttcattttttttcttctctaatttatcaccctgaatcccattagtaaattctgttttctctgcttttaaaacataccctgaaaccagtcacttataatcagccttattgctgccattccaggccaccatcatcactaataagccttataaatggtggccctaacttttaacttctgtatccagttgccagagtgacataaacctaaatcatgtctttccactgctcacttagattataaatactattgcacttagaatacaatttaaaatccttgctgtggcctacaaggttctgtgtggatggtcccagttatctttctttatttaccccctaagcattatccacctggcttaccaagttacttccaagctgtctcctgattgttctctatttaaaacaactgctttattaacttactgggataagatacataatggtacttatcttttttttttttttctgttccccagtagactataagcttcataggtaggaatgttattttgcttcttgtgttatcttttcttcacctggtacatagtaggtgctcaaatatttgccaaatggaagatggggacagggaaattattctacaggtcttgtcttaattggaagattgaaggataagagggtctttgtggagaaagtagtctgtaagaaatagtagtaaaatatgggactgatcactactgccaggaagaggaaagtaagcactagaactttcaaattcacagaagcaaaaatgaaatgaatagtaatccaaccagaccagtgggagtcaggaaaggaaaagtagaaactgcaagatagaaaagaaagatgaagaaatgggaatgggccagagatttactgtcttaccaaggtggagcagccccatttctctctaccctcttaggactcaaaatccctggacttcatataacaaagaagcataggaagatgctgaaaggtggagagaagactgtggccactctagagtcctggggacttgagaaatgacaagggtgtcagttcccctccttactatctcccacatgtctagtacagggcactgcagaagcctccatccctgaaccaccagtaggcacagacagcaaaactctgagaagagcctgttccccatagccagaggacaggggaagggagggtggtctaacaaaacagagcttttgtcagtactcactctgctccagctaaaccaaggaaactgccctcctcccttcccaggcttcgagagcaggcagcatgcttcggttccccacccagaggctgaaggcatgcctgagcagagagttaatctttcatatcctgcctggcagaagcaggtggtacttcaattcccctgtcaggtggtgctgacagcgcctagtggggagctgatcttccaccctctgcctggtaggagcaggtgatgctctgacttctctgccagggtagtgtcagcaaggcccaggttagggccatatccagcccccaccagccacaatgaggtggtgctagcagggggctaattaccattacacttgacctcttccatccccatcatcccctggtggggaggtgtgagcctccacacccactggtggcaaatgaggtatggaggagcggagcatgctggcactccccacctccccgcccctcctttggtataaatagggcccccgggggtcctgaacttctgctcctggatgcagcaacaaactggcatggcttagcccttggctttcccttccctgtggtagcttggcccagagggtagctgatcttacacagaggcaacagaaatggtgagttggagccacactttggctgggaaagtgtcagtgagctgaactctcaccccatctgtctgcaacaaggcaatgtgagtcatcaccccacttttgtcagggtgatggtggggagtggggggctagtgggtaactgaatgtgcatacccactcatccctggtattaatgcctttttagcagggaagctgcccactaaaagattaaatttgatctggggtctcttaatatcaaaaacatataggatacaattcataccaatttatacaattctacagatcactcataccaagatccaggaatatcacctatgaatgagaaaggaccatcagcaggtgctaactgatttatctgacaaggatttgaaagctgctatgataaaatgtttcaacaagctattacaaattcttttgaaacaaaacattagaaattctcagccaagaaataaaaataatttattaaaaaccaaaaagaaatgatagaactgaaaaataatgatagtttaaaaatactgaatgggctcaatagagtggcaatggcaggctgagaatcagtgaacttgaagacagaaaattagaatctgcccaatgtgaaaaaaatagactggaaaaaaaaagtctcatagacctctggagtgatgataaaagagataacacttgtgttgttgcagtttcagaaggaaagaatagagtgggaccaaaaaaaaaaaatctgaagaaataatctgactataatttctcaaatttggtgaaagacagaaagctgtagatctaagaagctgagtgagccccagacaggatcaacccaaaggaatctgtgccaagacacatcctgattaaacttgtgcaaggcagatacaggaaagctactgaaagtagctggagtttaacaatgtgtaatttgtaggggaaaaccagtccaaatgagaggagccttctcatctggaatgatggtggccagaagaaaagcagcacaacatttttcaagtactgaaagaaacaaccattaaccaccaattctatatgcaacaaaaatgtctttcaggaatgaggggaaaaggaaaactttcttgcatgaaggaaaacaagttgtggttggttaccaagcatacccttaaaaactaggtaaaagttctttaaatgaatggaaacgaaaacataaggctctgaatttcagaaaggactggaatgggcaaatataggggcacatgtaatagactttttatgagttatatttggttgaagcaaaattttaatgtaatatgatgtagtaaatatatgccgcggaaatatttaagacatgcttaaaaagtggggaagggccttttggctggaaccaaccatcttctgttaatttgccaaaatgatgaacgacaaagagaaaagggagaggcacctggtatgttctctaggccttttagaaaacatggacttgttcttttggccacatacctgcaaatctataagaaagatgatattggagacatcaagggaatgggtactgttcagaaaggaagccccacaagtgttaccatggcaaaactgcaagagtctacgatgttactcagcatgctgttggcattgtaaacaaacaaggtcagggcacgactcttgccaagagaactaatgtgcgtgttgagcacattaagcactcttaagagccaagatagcttcctgaaacatgtgaaggaaaatgatcagaaaaagaaggaagccaaagagaaatgtaccagggttcagctgaagagccagcctgttcccagagaagcacactttgtgagaagcagtggagaggaacctgagctgctggggtgtctctcctatgaatccatggcatgataggtgttaaaaacaaacaaacaaacaaacaaaaaaaaacaccaaaacaagaaaatactctggactgtgtttaaagaaaaaaaaaagtggggagagtaaaggcaacttacatggaagcatggaagcctgtttttcctattttgcttgtgctggtaaaaatgttgataccggtagagtgtgataagttacatatgcttactgtagtccttagagcagccattatgaaaactggtatactcgagcactatgaataaatgaaggtggaattattaaaaaattgacataatccacaggaagaaaggagaaacagaagaaacaaaataacagaaataattaaatggcaggcttaggcttgtcatactaataattggcttaaatatagatgatctgaatacaccaattaaaggatagagattggcacagtggttaagaaaacatccaaaactgtgttgttcaagaaattctcttaaaccaatgacacaggtaggttgaaagtaaaggatggaaaaagatatgccatacaaacatgaatttaaacaagagtggccatattaacattcaaaaataatttcagaataaattaataaagacagaggcataaggatcaaataatgaacacattaggaagacatgatgatcctaaatatgtacacaccaaacagaacctcaagatacatgaagcaaaaactgagctgaaaggagaaataaatttaacaaatactatatacatataaataaatgtaataaataactgaagtcttaaacaccatattcttagcaattagtaaaactatacaccaaatcagcaagaatataggacttacacaattgaccaacagaatctgacatttagaacaatttacccgaaacaatagaataccctactttttaagtgcccatgggacatcatagacattattctgggctataaaataaaaaacgtaaaaggattgaaatcctacagaatttgttctgtggcaataatggaatcaaactaaaaatagtaaaggcaacaggaaaatttctaaataacacatttataaataattcatacgtcagtctcaaaggaaaatattaaacataaaaatgaaaatatgttattaaatatgtgggatgtagcttaaagcagtcccaagagggaaatttatagcactgttataaattaagttgaaaagtggaaaggtctcaagtcaatttaagctcctacctcaagaaactagaaaagagcaaaacaagcctaagcaagcagaacgaagagcagaagtcagtgaaattgaaaagaggaaaaagaaaaatcataaaaatcataaaaagttatttctttgaaaagatcaatgaaatttagcaagactgacacagataaaaaggaataagacccaaatcagtgaacaggaatgaaatagaggatatcactacagaggctgcagccattgaaaggataattaggaaatcccacagataactttgtgctcataaatttgacaatgtagaggaaatatctttagttttaattagctttttattttagtttttctcaaaaactaaaacttaataaaactcaaccaagacaaaatagacaatcagaatgtaggcatacctcagagatgtggcggatttggtttcagactactgcaataaaccaaatatggcaataaaaggagtcacagaaagtggtttcccagtgtatatatataaaagttacatttactctatgaagtgcaataacattttgtctaaaaatacacacagtaattgttgctagaaaatgctgacacaaagtgagcacatgctgttggaaaaatggtgctgatagacttgctgaaagcagcgttgtcactaatcttcaatttgtaaaaaaacaagtaaaattaaaaaaattggccaggtatggtggctcacgcctgtaatcccagcactttgggaggccaaggtgggtggctcacgagctcaggagatcgagaccatcctggctaacacggtgaaaccccgtctctactaaaaataccaaaaaaatagcggggcatggtggcaggcgcctgtagtcccagctactcaggaggctgaggcaggagaatggcatgaacctgggaggtggagcttgcagtgagctgagattggaccactgcactccctggagcctgggaaacagagcaagaccccgtctcaaaaaaaaaaaaaaaatcatctatgaagcacaataaagtgcaataaaacaaggtatactgtaatgttaaagccattaaagaaattgaattcttaattgaaatgctcccttaaaaaagaaaaaatctctgggtccagatggtttcactggacaatttaccaacatttaaagaagaattaacaccacttttattcagtctcttctagaaaacaggagagaagacctagaaaacaggagagaagacctacaaagtcattttgtgagtctagtattaccctgacagcaaaatcagagacagcaaaaaagaaactccacagttcagtatcgctcatgaacttaaaggcaatgatcctcaagaaaatattagcaaatcaaatagagtaattaataaaaaatatttaacatgaccaaatgagatttatgccagccatgcaagactggttcaacgttcgaaaatctatgccacccaccatatcaacagaccaaagaaaaatcagcatctatcagttgacctataaaaagcatctgacaaaatccaacattcattcatgattaaaaattcagaaaactagcaataaagaactttctcaactaaagagcatctaacaaaagccttctccagctaagaccatacttcatgatgaaagatggaatgtctttcctctcaggttgggaacaaggccaggatgttcagtcttacctttgctgtccaaaacagtagtactaaaagatatccagaccaaaaaggaggagcaaaacagtcccagtttacggattacatcattgtttatcctaagaaatctagaaaaaaaacttcttgaactgaggagttcaacatagttgctgcatacaggatcaacacaaaaaccatgtttctataccctaacaaaaaatatgcagaaactgaaattaaaaacacaatgccatttatgttctaaaaattgtgaaaaagatacaaacttcaacatgtgtaggatatttgtgctgaaaattacaaaactgatgaaacaaatcagaggacccaaatgttgccacaaaccatattgacatactggaatattcaacacggtaaatgtgtcagttctccctgaattatcgtagcttttatgcagttcctatataaaatcccagcaaagatttttggtagatacataaaaaggttattgaaaaacctgtatggaaaggcataggccccagaataactaaaacgatctagtaaaagaataaagcagttggaatcactctactgatattaaagctttcccttatagtgatagtaatcaagatacacagatcaatgcggtggaacagagaactaaaaaaatacataaatatgccaaattaatttttgacaaaggtgaaaaagcaattcactgatagattattcttctcaacaaatggtgttggagcagaaattggacatccatagacgaaatgatcaaccttgatctaaattttatattttatacaaaattaactcaaaatagattatggacataaatgtaaaattgtaaaactcttaggcaaaaaaggagaaagttagccaggtgcggtggctcatgcctgtaatcccagaactttgggaggccgaagtgggtggatcacctgaggtcgggagtttgagatcagcctgaccgacatggagaaacaccgtctctactaaaaatacaaaatcagccaggtgtggtggcacatgcctgtaatcccagttactcaggaggctgaggcaggagactcgcttgaacccaggaggtggaggttgcggtgagccgagatcgcatcgttgcactccagcctaggcaacaagagcgaaactccatctcaaaaaaaagaaaaaaaaaaggaagtcttcagaatccagaactaagcaataagttcttagtctttacaccaaaatcacaatccataaaagaaaaacttggtaagttagaaccagttaaagactttttctccatgaaagagcatattaagaggatggaaagacaaggtacatactagtagaaaatattttcatctgtctgccaagagactaatacctagaatatgtaaagaactttcaaaattcaataggaaaaaacaatccagttggaaaatggacaaaagacatcaacagacttttcaccaaagaggatatttaagtggcaaataatcacagaaaaagacatacattcagtattactagccattagggaaatggaaattaaagccatagggagaaaacttctgctaaatggctgaaaaaaaaaaaaaagcaccaaatgttggtgaagatgcagagaaacattgctcatacattgctagtgggaatgtaaaatggtacagccactctagaaaacagtttggcggtttcttataaaactaaacgtagaactatgatacaacttggcaagtgtactcttggatagttatctcagagaaatgaacacataatcatgcaaaaacctgtacaccaatgcttagagaagctttatttataataaatacccctacacaggaaacagcccagatgtccttcagtgaacgcattattgaaccacagtacttctgtatcatgattacttctcacaataaaaagggccaaagtattgatgcacctactgtgaatctccacatcgagtgataaaaagcctattctaaaaggttatatgttgtataattccattgatgtaatatttatgaaatgacaaaattctagaactggattagtggcttccagtggctaaagagcagaagagagtaggacggacatggatgtggctaatgaaagagtgacatgtgggatccttgtggtggtggaaatactctatcttggctgtatcgatgtcaataatctgtatgtggtattgcactagctgttcaaagtgtcattgttgtgggaaacttggtcaagggtgaatgggatctctgtagtatttcttacaactgcttgtgaatctgtaattatctcttaataaaaagttaaatatgaatggactgacttctattagaagacaagattggaaagtgccttaaaatacaggtgataacaagtaactcttcaattgttaaaggggaagatgaaagtgaagagatgggcaaaaagataccatacaaacaaaaaacagaatggcagtgttgatatcagatcagttgagactaacagttgaaagcagtaaacatattacggacatattattgataaaagacatttatgaagaggataaactgtgaaggtgtacagacactaaaccatagttgctaaacacatacaaccaaaaaaaaaaaaaaaaaactagaaatgcatgtatattttcactaagtttagttagatcaaacaaagcaataaaaggaatattttgtaccaaagcctatggacacagtgaaaactgtgtgcaggggaaaaaatctacagaattaaatgtcttcaggattagagaatacaaagtaaaaagtgaacaatgaaactccctacatgttcaattttaaaaaatgttttaaaaatggtggtaaaatatatcctaatttttcatctgaatcattaagtatacagttcagtagcatcaaatacgttcacattgtcgtgcatctagtctccacagctacttttatcttggaaagctgaagctctgtacctagctcaggatccaattttttttctcgttagttgtataagaaaattccgacttacttaagtagtggcagttattagcttttgagaacagtttctcttgcagtttcaagatgtgctttgcttatgttgatatggaagcttaaaagaagaattgtagacagtttatttccaggctgaataaaaatgtgacagttgctcttgttatcataaatagaagataccccaaaatttgcaacaaatgttaaaactgcattaccattctcagaataggtggatatcgtgttcttcttcgttgttgctggactggacgtaatggcatgctgatagcacgtttcaatcagatgggcctgagccctgtctagtgtataatttaccttttcatatatactgcaggagtgtccctggtagtaagttctgagagaatgaacgtaaaagttcagcagtcctaaattcagaaaatgatgagtggtgagcctttgtagttaatgacatgattactgccagtcttactgttgtacagtaataacaagagatgcttcatttccaggtccacacaagcacaaattgacctaccacacagggtagtgctttggggacaacttatgtaaaaatctgaatagtacccatctgattatgactgttgtgctttattacagattttaaaacatattgcaagaagttaagcgtttatagaagtctttgaagtcttgttgtagaacttcgggtctccacggaatgtggtttgatcactgctgcattgaagtacacagagggcatgttattaggaactgcattttggatttggaggattttattttcagataacttacggattttatagtgaaaatgcttatgctgatacctatttcctggtttctctgggacctgacttcttccagataaataatatcttcaaaagaatacattgaaaaaagatattgggacatgacatatgttaggaaacaaaaagagactgaactaaccttttaatataaacgtagtatgtcagcaaaccaaagtagctgtcattaagagatgagaatttcctgaaaaaaattacgtaaaatcctactcagtgatattaacacattaaatatatttaacttagacattcttacaataagcatgatttgcaatgccattttatttaaatggcagagaaaccccaccattcaataacatgagttatctttttttccaggaaattatttctgatttgaagatgggagtatagtaacatatcagggcttgtaacatgttttcagaaacccaaattccaggatggtggcacggctgaaaagactcctcagcgttatctgttttcccaggcgatgccttgccgtctctttcctgtttcagtgcttctctagagtattgcctcctcagtagtaaataatgttgttccatgaaatttgagatttttcatattgaatagcttctcgcagtaatgtttgatcctttatgatgcaggtcaccccatctagatgacacagcttgggctgccgtgacattggtagtcaggcgttcagtctgttggaattgcagtgtcatcacccactgcagttattcggttcttgttttctgtcttttaagcataataattaaaacagttcttttagaataaccccattgttagatgtttctggcacttgtactcctggataaaatgtttttgggtctaatttttaagatttagagtctcagtttttccacattgcaacttgtgatactgcatcctcttctgcttaaaatctttcagggaggttcctactgtcttaagaataaatttcagactcctgtgcatgcacaaatgctgctcataataaagctgattgtgccctgcatgtgggcaccagcgagaagaggagtcctgccagcttgtctgcagctctggggctggtttcggtgggtggggacctttccccttcactgagaggtgtcacctgggctagtggagctcctgtgagcctccgtgcaaggctgttcatctagcttcactttcttcctaggcttgtctctccttcctgccagcactacaacgtacgtatggtcctgatcgatgaagctacttcagattccacaagtgtgctgtgctttctggtgcccttgtggtaataacaatagagttaacatttatttatttttaatttttttaatagtcaaggtctcactctgtcacccaggctggagctcagtgatgtgatcatgactcaactgcagtctccaactcgtgctcaggcagtcctcctaccttagccttctgcacccccacacctggctaatttagtttctttttttttttttggtgtgtgtgtgtatgtgtgtttgtgtgtgtgtgtatatatgtatacatatatatatacacgtatatatatgtgtgtgtgtatatatgtatatatgtatacatatatatgtatgtgtgtgtgtgtgtgtatatatatatatatatatattttttttttttttttttttttttggtatagcagtgttttgctatgttgcccaggctggtctcgaactcctgggctcaagtgatcctcctgattctgcctcccaaagtgctagaattataggcatgagctactgcacccagccctgagagaattatttattctcctccttctctgctaaactaattggagagagtttcacttcatacaccaaagtctgcagttaaattcttgctgttccctgaaagactttgcatcttcgtgcttctgttggttgcccatgccattccctctgcttgctttcactgcctcttgcatccagacgttagccggttaagtggagttgtacttgatgccacttcttccaagaactcttctccaggtgcacaaaccagatttttttttatattcttttagcaattttgtagtactctgacaacacttggcacatatcttcttatactcttttgtatatggagcagtatttttataggtgaaagagtctaattttgcattattagtgtatatatgatatgttggataccagttggagatctggtgatgtcataaagctgttggtcttactatgcctttcccagaagtacctgatgaagttggaacaaaataacttttcacctattctctgattactacagtcaaggctccagaaccctagccattgggctcaaatgtgccgttgaaggtgattttctgttcctagatattttcaacctccctgtttcatttctgaccaatttttagggccagaggctaatccactagaacaatatttccctgtggcatggtttttaattttgttctgaatttagtttatattcctaagtggctttacaagttttttctccccatgccctcagaggaagttatgttcttctgaaccttctgggtaccattttagtaaattaagaattcagttcactgaatgctacccctgtggcctgaaagagttaatacaagtttcttaagtactttattaattctcagggaataatttatgcactagagcgtggcttagtatcgagccagttacaaacacattaaatatgtttttttttttttccttttgtgtagtaagtctctgaaaataagtggaggttcactttaagtgtaagtattttgcttcctaagtacttaaatatgtataattccacaatgagagaaggagtattataacagaggatgaggtggattcaggtcctagctcagccctgcacttctgtgaggccttggtgtgtttacctccctaaatgtctctcacctctaaagtggggacgatgtttacatcacagacagcaaagctcaatgatgatgcacttaggttttaatgcatagcccaggcttactgcttgggtttgattcttggcttcactacttgataactgtgtgatccgaggcaattttattaccctctctgactcagctttttccactgtaagctggaataatgctagtacctgactcacagttgttacgaaggtaagtgtgcagtaaatgtgagccattcatatacatcatggactactatgcagccataaaaaggaacaaaatcatgtcatttgtagcaaggtgggtgcagctggaggttgttagtgaattaacacaggagcagaaaaccgaaaacaacatgttctcgtaagggagaactaaacatcgagtgcatatggacataaagatgggaacagtagacacttgagactactagagcgggagggaggaagacgcagggcggtgaaaacctacctgttgggtactatgcccactacctgggctatgggctcgtctgcaccccaaacctcagcatcatttagtatccccatgtaacctgtgtatgtacccccaaatctgaaataaaagttgaaattgtttttcaaaaagtgagctgttattttttttaaatactcatttggaggactttctgagctgatcaagtgaaataaaataaaaagtgccaagtactatgcctggaacatggcagcaaacagtgaatagaggatgacttttgcttttattaactacttaaggtttatctatagcaagttccagtcttaagatgcacatgtgaaaagctgcctgtcacatgaaagagtttgatgccatgtagcttgtcatgttgtcagactctgtccctggagtgtgcccctcacgtttttgtgcatgtcactgtggcatttatgtgactggtctgcgcttctttctcctttttacccctttggctgcaggatgttgaagtgcacttcagttttgtcgttctcatttcccttctggattcttgctcctctcctacttctgctgcctccttcctcagtcccccattgccttcagctgccctgtggttgcagtttaaaaaaaaacaacaaaaaaaacacaacaaaacaaacacacaacagcctatttagatgtatacctttgactttatgagggctgtggttttgtgggaagagcagggtctcacccttattagactgtggttcataatcacttaaagagaacgtcattcttggagttactcatctgaaaaagaagcctgctcctccaactggaaggggaatggggctggggagggagggggttactgttggatggaactgtgcttggctattggacctgagtgactgaacacagtgtccatgaaggagctggctaggcatgtgttctgcggggaccagccctgtgagggcagaggactaagaagcgaaggatatgggcaaggaaactgtggaagtcatacctgcctttttgggccagagtacatgtatcttttatttttttttgagacgtagtctggctcggtcgcccaggctgcagtgcagtggtaagatctcggctcactgcaagctccacctcccgggttcacgcccttctcctgcctcagcctcccgagtggctgggcctacaggcacctgccaccacgcctggttaatttttttttgtatttttagtagagacggggtttcaccgtgttagccaggatggtctcgatctcctgacctcattatctgcccgcctcggcctcccaaagtgctgggattacaggcatgagccaccgtgcccggcctaagagtacatgtatcttaagaccacatcctggattggtagatacagaaggtttactccttgggcagtgctggactcttgatgaagtagcaggtagaggatgaagtttggggactttgtgcctctcacatttatgcctgctttttaatgtagcccaataacaaaaggtcatgctattggtgatgggtgggtaaggtacctactaacagtaagtttagcttagggagaggtaagccattttaagtctatcagtatataatggatcacagaaggagagagtgggagacactcagtctatcagaaaacataggatggatgtgccacagaggaagaagttgtcacttaacaatgagtgtggaaaaaaacaaagtttatcagtgtctgtgtgggcgttatttatttggggacagcatcctaaggcaggcatattcccacagtggaaatggatgtggtgtgatgccatgaacttgtgaagcaagtgagtccctttgttgtgattccaaatttactcagcacataactgattattatctgctccccagtgtagttgtagtgggacagattacattgcccagaagagttcagtattcagtcttcttggtggttattttgttgtaaattaataatactgatagtatgtcattttgctttttataattgattgtctttaactttgccctgaggcatttttcctaatcaactctagaccatgatagagcctttgggccacaagactaacagtcttaccttgaaccaccagtcagtgaggtgtttgggaaaaccttttcctggtgatgtctcatcttttccttctacagtcaccaatgtcatatttactgtgttaagatgctaggctttgtactggcttgtttacttctcacgatttatcttgcagtatgatagtttgtgtgacactgaaaaaaattagtaggactgttaaaatagttttttccccccattaaaagtagaatgacaccgttttgcttctgaagaatttggctttaactggtttatattttgagctgggtattaaaggagaattatggtagggtaaacacaattagtgacatctggttgccccaagaatcaataatatctgatactacatacataaatagatatctatgttgtgataatatatcttagtttcactgggtaaaactagaagaataaaaaatttgaaaacagcttggttactgactaagctgcagcagttctgagagcctactgttgtcatttttaatgggcagccttgtacttccatagattggttaatcttaaaggccagatggtagttgtattgtaatttcataaagattttatgtcctatgttttgctttcaactagaagcatgagaatttaggaaagttatattgagacatataaataataaaaattggtgaatcattttacctaacaatttattgatattactcaacacaaggagaaaaattagaaaatggaccttaacaccactgtctactatgaagacagtatagaggaggcaggaaaaacagaaagcacacaataacatgatagctataaattcaagtgtcagtaattacaataaatgtaaatagactagaggattctgctaaaagacacgtcagattggattaaaaacatctgagatactaggtttacaagaagcatatctaaaaacaaagatacagaaggcaaaataatggaaaattttatttcaggctcactttaagcaaaataaagctggtataacatgttgatatcagacaacatagaaatcaaggcaaaaggcattagagatgaagaggatcactgcacagtggtaaaaggttcagttcagatataggtacatattatataaagcaaaaatatacagaaacaagaaaaatagctgaatgcacaatcctagtgggaagttaacatacctttctgaatagtacaacttgcagacagaaatcttaggatatggaagacttaaagaacatgatcaatgaacaaatctgacctcatggacattcatagaatgttacagttcctgtataatccattcttttcaagcacatggagcatctgacattgattacatataggaatataaagcaagtattgataaatttcaaatgattgaaatcatgtagagtatttttcttacggaattatagaaggaatcaaccaaaagataacaggaaaatccttgtatgtcaataaattaagaagtatatttcttataatgtataatatataattttataaatatataaatatatatttataaaagtttcatttaaaaagttttacaaaatggaaaaatctgtcacttaaatacaaaatcactgtacttctgaccctactaaatgtaaaaattgtcaggatttgggaggttttttttttgatgtccaaatacttgatacacgttccagagatccccaatatttttgtgaattcttcttaggaggctagtgatcatgtatgtgggattaggaaagtaattgtttgagctaaatgggggaagagatcattcctgctggtagcagggagggtgtgccacgacgagagatctgtggatttactgaaaacacgagatttacatccagagcttagttcacaggctgtggctcctgtttttattcatttagaggctgatagaccagctgtgcctgtagttacgtgttctttggccagacacctaaggaaatttgaggctcagacaagctgaagtagatatttctgtttccatgttgaataacagagccactcatgggctgtcacagatacactgtttggggttttaccattccttcccatttccattcctgaaggaaaaagagaagagatttttctttttttttcagattattactgtgttggtgacctagggaaaccctttttttttctcttctcttttcacaaagttctgaggagcatgaaaaaattgaggtattcacagtgtctggggaggaaatgagttctgtcctgtattttccgaagagtgggaatctaaatcggaacaggcaccaggttgaagaaataatttgtcacatcatggatgcaggaacaagctctacatgggaatactttgttgtagttagggtctgtcttgagggaaaacaagacataaagggtatgtgaaatgttttctggtgatcatatcccaccgtgtcattagttcttttaaagtactttttctatattatcccaatttagctttttttgcaccctgcagcaattctatttctattttgtttcctgttatcattgttcccttttctgagtagaggatagataggtaagtggtgtaagtaatggcatggaaagatccaagaaccattaagtagattatatccctttttactatccttttcttaaagtgcttgacttaattctgaatagccacttacaaactttgatgagtatctttcatcttgggggttattttgaaaattgatggcatttggaataaaagttgctataaccttagtgtacgtttgggtttataaaatatactgaacataggaactcacatgactcccaatttttgaagtaaccataatttctaaaaaaaattcaaatgagctgagttacatttataccactcctgggaattattagaatagcatatgttctctgtttatgctctttgtaaaattggaaaagtaatgtgtagctctttttagtagtgccctgtgtgtagtttctgtaacagttctgtaactgtaacttaccattccagtctatttctgaatggttagtggagctgcccgtcaaagccagacctattacaagggatgatatttcccctgtcatgaatagaaactattgatgactcgattaacatacaaggatgatacagttcatggttaaagggagcatgcttccttttgctggtgaaggaacattaactgtagatttcatctagaagatcactagaaaaagcagcctcccatgtttgagcgtgtcctgcatgtcagtttccatgcagatgctttctgtacgtcttcacgtcctcctcatccatgaggttggaggtgaaagttacgtaactgacttgctcagggaacacatttcatgttgcaaccgggctccatagccacatttcagaccatttttcttttctttttttttttttttgggacagactctcgctctgttgcccaggctggagtgcagtggcgagatctcggctcgctgcaagctccgcctcctgggttcacaccattcttttgcctcagcctcagcctcccaagtagctgggactgcaggcacccgccaccacacccggctaattttttgtatttttagtagtgatggggtttcactgtgttagctaggatggtcttgatctcctgacctcatgatctgcctgccttggcctcccaaagtgctgggattacagcgcctggcctgaccatttttcatttaaccagcattcagattattaagtcaaacggaaaaaaaaaacagggatataaacctattagaaaccaatgtgactgtttcatgccttacatttatgtctggaaagttgaatataaggaaaaagttgttttttgaaatagtttttcattggttccaatgattattcgagagttttccgtgaaagaagtataggtaacataataaaagttaaagttaacagtcttaacacttcaattgtaagaatattttgtggtgtcagtgtattaatagctcctgaaagaaaattgtcaaatgtaatcagtctacatttttttcatgtgtatcaaagctacccatttattaaatcacagaagttaattgtgtttcattgggaattaatattgactttataggtcttgggtagattatttaaatagccctgctagctaatatgttaacccctgcccttattacaaatacatcctgacggataagggcaaaatattattgactagattatgcttgaatatctcaaaatgaaaacagaatgaagcagctaaccaaggaaacgattggacttaaagtgtacgtacttgatcacgttaaagaggcctcactgctgtgtaacaatagatgcttaaaataatccaccagccaacactcactacatgtgaaagtggtttactttcttgtgtctgtggggaagctctaattatatgattataattaagctacagtttattttctcattttctctgattaaattgtggtgggaaatatctggccaaatctagtcttttcttagtcatgttatttgttaattccattgacacatcttattaaaatttgcagcaaggtgttttcctgttaaagtaattgaagatttcagagtatcttatatctaaaaattgtgaatattctctgaaactagacctaaagttcttaaaatataaatgcgtcattcacgtagattatggagttacttttaaaatgtagctatccactgaagaaaattgtgaaaatgtcccattaacgatttgcaaatttatttatttagagatggggtcttgctttgttgcctggggtggagtgcaatggtgcgatcgtagctcgccatggcctccaactcctgtgctcaagcagtcttcctgctgcctcagcctcccatgttgcttgcaattacaggcctgagccactgggcctggctgccatttgtaaatttaaatcttaacacttatgtggtgtttccagttagatttcttctccgttctttgcatcaccttcttagatcttccccattcttctcaatcccctgttccctccatcttcacggtacctttcatggaggaaatagaagccatcactgggaataccctcagctttccaccgacaaatctattcctgcagacacccgtcattgcaatttatattttaacaaaggcttctgatcctaatttcaggaaatagcctctaaactcatctattagtcccaaattctttacccatttaatctgctattttatgcctcctatattcttaccttcagatgttgagaggttggggcataaaactttgcagcatgtctgcagtcttccctctagagtgaacttgatcctgctgtttgttctttttattctcttcaaagttaaatcatgttccagcattcatggtatttctccagcttgtcctccacgctcaccccattgtcatgaggactgcactgaacaaatagacaccttatagtgcttataggccatagttgctgacagataacacggtttaaaaaggaagtttcacagccttgtagcttatgaattcccatgtcagcctcattagcttttacaagctattttcttagcttgtaagaatgttgctagggattcacagttaatataaatatctgtagttttggaaaattgagacagtgcttgcccttctctagtcatcctgtaccttttagatttgacctcttttttggggggtgggggttggtggtgaaatataacaaagtgcataaagcagatgtacagttcaaccaactgtaaaataaacatctgggcagttgccgtgcacatcaagaagtaggacgctgccagctctcggaagccctcgtgtttgttaccgctctttaaagattgaggcaggtgttccatgaccttatccccaagtctctgtgttataattcatacgagttgggaggctgcagtatatttggatgatctaagacctcctcctttatttttgcttaccattggattttagttttctctttccaatgtttattttctgtgtgtattctgaagataattttatctgaccaagaaagtaggtatagaactaagtgtgttgtctgtaattgtttgttacaatataatataactaaggaaactttttcaatttttgcaaacccaattttattctgctattgtttcctgataggaattttgggaattttagagatccctgcgttcttttgtacaaaaaatacatctttctgaggccaggcacggtggctcatgcctgtaatcccagcactttgggaggccgaggccagtggatcacgaggtcaggagttcaagaccagcctgaccaacatggtgaaaccccatctctactaaaaatataaaattagctgggcatggtggtgcgtgcttctaatcccagctactcaggaggctgaggcagaagaaccgcttgaacctgggaggcagaggttgcagtgagccgagatagtgccactgcactccagcctgggtgacagagcgagactctctcgaaaaaaaaaaaaaaaaaaaaaagatacttctttctgttaaacatttcctttaaaaatctaaactcatcagaaaaatacctgcttgaccacattaatttcttgaagtatctctttcttttccttttggaatcatgtgtttgtaaagtcacatgatttaatcttctagagactctggatgcttctgttgttgatgtatatgtgcacactcacagtcttaaggaatttggcattttatgtttcactgtctttttactcttgctccccttcttttagtgtttttttttttttttttttttttttttttttttttttttgaggcagggtctcactctgttgcccaggctggagtgcaatggtgcgatcacggctcactgcagcctcagtctccctgggctcaggtgatcttcccacctcagtctccctggcatctgggtttcaggtgcatgccacgatacctggcttaatttttttttttgtagagatggggtcttgttgtgttgcccaggctagccttgaacacctgtgctcaagcaatcctcctcccttggcctcccgaagtgctgggatgacaggcatgagccgcacgcccagcccactccccttcctcaccagtcttgagcctcctgttctcctttttcccctgtctaggccctcacatccctccacttttctctttttccccatgacttggtcatgacacagaaacaaagtccccagtgacagtatcttctcaaaaaccaaacagtaaactctgaactttctttgctattggattcatgatttgtgattaagcgtattttcccctttgcaggctcttagttatgtgtggtagatgtacttctaaattacatttgctttaaaaatataaaaagtatagagtaacataaatgatgtagcataataaaactttaaatcattaatgatattcatagattgacatataagctattcccagtcattttctttttttctttttttttgggggatggacagagtcttactctgtgtcccaggctggagtgcagtgacaggatctcggctcactgcaacctctgcctcctggattccagcgattctcctgcgtcagcttcctgagtagctcagactacaggcccatgccaccacccccagctaatttttgtatttttagtagaggcagggtttcaccatgttggccaggttggttttgaactcccgacctcaagtgatctgcccgtctcagcctcccaaagtgctgggattagaagcatggaccaccatgcccagccctcattcatttcttgtactagaagtggtgatctttgacaatttgttttaatatgaagttgttttaatgaggggcaaatatttggagcaattagctaatcattacaacgttttttttttttttcttgttttgtttttctcttttctttttttcccccagctactgctcctcgcagagcagggctaacccataggtagtgtgcccagagtcagccatcattacattgttcacgcttacagcataagttaaggtaggactcaaaaaatttttctgtaaagacaatctcagaattaagtgctttcaggaattactatgcagctagaattttctgtaggattgaaggttctagcagctttgagcattgatactgatcttgagaatgaatccaattggcagtcatcccctggaagacttaatttgaggtctttatacgtacttgcgctacagtaaataagaatgtgtcctagatggaggcaaaatggggtgggtttcaagcatttaataaatgtgttaaacattttaactattatttcctcttttcaatttcaaatagtgttaaatgattgttatgggtaggaatagggtaaacccatttctagggcatggtttagaacattggtgcagtttttttcccaagaatatcttaatcacagccctggtttttagtctgtttttctaagaactccgggagttatgctggtttcctcagggattgtttttggcattttcctcatcatagaaccttatggcatcaccttggagacacagcgttagtttaaggaatggacatgtgatcacgcaggtcaattggagtcccatttggtgcttttctgtaggagtagcagggagagactgcctcttctggttggattgctagtggtgtgtgggctgccaagtggcccccttcctggcaccaagcagaatgcagcacacacagggagcagagcccggaggcttgagcctgatggcacttgaggaatctgggtcctggaatggtagatgtcctccatgctacccacttgcatagtgaatacattgcctttttgtctaaggttaagttttcgttgttgttgttacatgcagaattgagaaatatggccaatatcttagggaaggtggcaagttaggaactgtactagcaggctattaaaagaatcacagaggctagtagcctttagtttttaattttttgattgtctatttttgcttgtttgtgatgagtatttctacacctggccagggatgcattcagataaacattttggatacctcctctaaagtgtctgtccacaccacaggatcaccgcctggtcccttagtgctgacattccactccaggagatgctgggctcccgggtggcgcgctgtgaggatgctcgagctgtatcaattgtgaacctcactttcaggagttcagtaattgtgagacggtatcttcaggcattgtggaactctttgggggatgtgacattccagggcattctggagaaaggaataatgttcagtaataaaaccctggagacaggaattcttactgtacctgtgacccatgaagtcttagggcaaatgtagaaggctctgtttggctgaatgaatcttgaggcatccaccttgccttggagttactttatttacagcaacagacacactcacaaagaaagtttgtaagcaaaatattacaacactttgttttgcttctggttctgccattctgctgtcatctttgcaagctgcaaaatgtgagggacaggagaagagaagtttttttcctcttatgtcatggccttcagcattcttagaccagagcctgctttctttaacactctaaccacttttattagtttgcttattcagtggtagaatgtaaactccaagaggtcaggagtcacactagtcactatattcctggatagccccagccaaatacctgacacagcaggtgcttgatagacaatctgttgaattatatgcaatctgttgaatgaagctcttaagttatctagattttaggaactactggggcagattctcatcagacaggtgcaaagaatgggtattttaaagcaattagatttaacagaacatcattatgcaaatgtagctctgggatgtcccactcagatgccaggcttataatgttattgaagtgttacatgaatttgtgtgtgtttgtgggcggagtggattctcttgttaatattgggcctcaggtttattgatattttcgatagaaataacttgaaaattgctgatgaaagatacaaatgtttctttcccaggtgttttaaattttcttaggaatatatgacaagctggcgttggattgcgtgtcctaggttttgttaccttggcccagtgctgctgtcactatcccaaccacctggtctgtctgatcctggagcactgggtgagaagctgtttattctgtcagtctgactgtattagcagtcccccctccccacagaggcagagaagactccactctgttatgtaattgtgagtgctgggagatagtggggggagttataatttagggaatttccatattggagatagtactgcctatgtgtcatgatgcatttgacatcatatgggttattcatcgatgggttattcaacacgtttgaatagtaaggcctccaattgccatttatagcatatgtgctaaagaaacaaaatggtgtgttgggagttacatccatcatctttcccctttggttgaaatttaaagtgacagactgttgtactttaaaaaccgtattgatcaaatcatcttaaacacatactaaattcctagaaaaaaatctgcaattgatactgtagttttttctatattacaattatttatggccaggtgtggtggctcatgcctgtaaactcttcgggagattgaaacgggaggattgcactcgcatctggataacagagtgagaccgtgtcccttaaaaaattcattttaaaacccgaattgaaattagtcgtaaatttttaaacacttatggtgagaacatttgcatttctatcataggacctctgtgttccttgttcttctattccactttcttgtcccaccttctggtaactgtggttcttgctttttctgtttcaagttcttgcccttggcttctcttcccttcccagcatctctgcctgccttgggtttctttctactctctcaccttcgtttcccacatcttctctatttgttctccgccctgtgattcactctatatttaaatctacaattttaccctccctcgttggtttattttttaattgtttctaaatctcagtaagcaatttgaaataagagcaaggtgtggtgcctgatcaattaccctatggctgccacctctttagaactattggcttagaaatcacctttggtcacacgaaatagggcatttattgcaggtttattagtggggagaaataacaattgttccatgcacagtattggtgcgtttctattctcaatcaatcaagaataaccggtgaattttccaagatggttatttaaagtgctatactaataatactgaaagtaagccatatgcacaacctggcaattttttaaaatatcttttaagtactatatatctaagagcagattacattttcagtggcagtcctcattttctccacattgagttatgtcttggtaccacgctttattgcaaaactctcacaactaaaggatttaaagtttattattgcgattttaaagcaggatagaaaggaaaggagagaaaaataatttttctgagtgaagggacctagttcttataatagcattttgatctgaggactgtgctgtgataaataactcttactgtagaatctagatgaaattaaccctgggagaaccctatatatccctgaggcatttggtggccgactacgacagtgtgtaatctgttttcacatagtatagtacacagatgtatatgtgagctgagtgtaaatgcagacttctttcacctttttgaagactatctttttgaagacttttcttggagaggatttatctaacacctgtttgaatcttctctttttgttatcgtggtgatcttatttgagtagtattttggtgattgtgtttgatcataaatatatagcagcagaaaatttttgcagcaccaaactcataattcttggatttaccatatctaaaggaatgccaattttgcatattttttcctatatctttacaagcctcattaaaatattaaacttaaaaattttttaaagcataattgcgtttttcttttcaaacttctgaagaaatgtacaagatttaaaattaattttgataaattaatttgcatttactttgtaagccagcactttgtagtgtgaaataatattgaaaatgggaaacaatatgtattgataattaaatgaatatacaaccagttttcttcccggaagacattttcatgtaccatgtaaaaggtactttttggaattatttatacttttatagttttccatgcgtgtgtgattagacttctgagaaaaccttggataattttacgatgataaacatttatatttcatttcagtgtagttcagtcacttaaaaatatccacttaattttattttggggacaactgtagattcacaagcggttataagaaataatacagagaaatcctctgcccccttcatcagtttccccttatggtggcatcttgttaaatgtggagcaatgccacatctaggatattgactttagtacagtcaagaaacagaacgtttccatcaccacaaggatctctcatgttgcccttctgcagccacactgacctctcctatctccttccacactgctcggcaaccatgaatctgttctccatttctataaatttatcatttcaaaaatgttatataaatagaattatactttggatattgctcttttttcattcagcatagttccctgacgattcatctagattgttttctatttcagtaattcatttcttttttattaagtagtgttccatggaaactgtgtaccacagattgtttaaccattcacctattaaagacatctgggttgtttccatgtttcggtggttacaaataaagtcgctataaacatttgtctatagattttattgtgtatccatttttttctgtgataagtgcctaggaattcagttgttggcttgtatgttaattgtatgtttgttgtttaagacagcggcccccaacctttttggcaccagggaccggtttcttcaaagacagtttttccatggaccaagggtgggaggtggtgtggatggttttgggatgaaactgttccacctcacgtcatcaggcattaggttttcacaagaagcacgcagtctagatccctcacctgtgcagttcacagtagggtttgtgctcctatgagaatctaatgctgctgctgatttgcccggaggagctcaggcgggaatgctccttcgtccactgctcccctcctgctgtgcagcctggttcctaacaggtcatggactggtaacagttgttggcctgggggttggggacccctggtttaagaaaccttttttgaagtgttatactattttacgttgtcaccagaaatgtgtgaatgtgatccagtttcacatcctcatcattatttggtgttaccattatctttcattttggccattctgagatgtatgtggtgataccttattttggttttaatttgcattcccctaatgttgaacattgttttttcatgtgcttgtttgtcatctctatatcctcttcagtgaaacgtttatgtcttttatccattttctaactggatcgtttttcactgttgaattttaagagttctttatatattttagatactaggcatttgttgaacatttggcgtacaaatatattctcactctgtagactctatttccattcttttaacagggtcttttgcgtagaaaatgtttttaattttgatgaagtcagattgataagttttttcttttatgggtcatgcttttgctgtcgagactaagaattctgcctagacttggatcctgaaaattttctcgtgtgttggtttcttttaaaagttctgtagttttatgtttcacattaaagtccatggcacattttgagttaacttttgtatatggttgaggttctttttttgcttttaaacccatggatatgcaattgctcctgcaccatttgttgaaaagcctattttttctccattgaattttttttgcacctctctcaaaaatcacttggacatatctgttcatctgtttttgcattttctactctatttcattgatctgtgtatgtcccccagctgataatatattgtcttgattactatagctatataataagctttgaaatcaggtacactgatgattgcccctttattttctttttcaaaattgtttctggttattctagttcctttgtcttttcagataaattttagcatacacttttctgtatctagaaaaaaatcttgctgtgattttgataggaattgcatcaaatctttggaagaattgacatctttactgtgttgagtcttccaatctatgaacatggtatgtctcaccatttgtttacatcattgatttctttcatcagcatttttagttttcagtatatgagtcctgtacatgtttcggtagctttacacttaagaacttaattttctttggagcgattgtaagtagtattgtattttaaattttggtgtcagtgtgttcactgctagcatataggagtttttatcttatatcctgtgaccttgctgatttgaggccgcaacttctgcagtgtaatgtaaagccattgaacatggagagggcaaaacaaaaaagtaaattggagtgcctcatacaggagtagattgtttgctagagaatggtggtagtggacatgtgtctcaattgtattcattttcagtttgagtgagtcacttttcatcttgtgcttttctaacacctggaacctcttttccaagaaactctggttccttttaggggagaataatttgaaaaccaagattctgggtaccattgcaataggaggccattacttcagaactctttcagtggtcggaactaagaaataaaaataattgagtttgtatcaatgttttcaattcaaatttagcagaaaaattcttccccttaacttatttcattatatatttctattcattttctcttacactgaaaatagtgatttcttaatgatatcaacttatttgctttatcttactatacacataaatgttttaaaattgctgtattaaaattaaaactattgaataaaatttaagatttccttgcaggtttttttgaagggcatagtcctttcaatatatactgctgaggatgtagagacagaacactgactttagaagtctcttcaagtcttttttccaggctgggcgtggtggctcatgcctgtagtcccagcactttgggaggccgaggtgggtgtatcacctgaggtcagtcaggagtttgagaccagcctggccaacatggtgaaactctgtctctactaaaaatacaaaaaaattagctaggcgtggtggcgggcaccggtaatcccagccacttgggaggctgaggcaggagaattgcttgaacctgcgaggcagaggttgcaatgagccgagattgtgccattgcactccagcttgggcgacaagaatgaaattctgtctcaaaaaaaaaaaaaagtctcttcatatattttttctgtgtagatattttaccgattcgatgttaatagtggtttatttctgtttctctaattctgagttttcaatttctggattaattctttccatataaataggtttgaagtcaaaattaaataaaaagttctacatagagaagcattctctgttttcattcttcccagtatcaccctataggtaaccatttttattacttttttgttgtaaaagaaagtacttgctttttcttccttctcatacacaatgtagtagtctatggtctctggtctcctcctttctttttttttttatttcacaatatattttggagattactccattatagcacatagagatcttcctcactcctttttacagttacattaagtactgggtaattttgccatgtgtacttttattagatcctgcagaattcccctttatggggattttattttgtactttcatcaacagtgtttgtgacgttcagtttcttctgaggcttgtcacaagagcagatttttgccagataggtgagaagtgctatttcagtgtagtttttatttacatttatggggatagttgaacatctttaaaaacatttaaagacttttgtctttttgtcaactgttggttcatgtcttttgcctatttgtatattggatttttgataattattgtttttattttatttatttatttattttgagacagagtcttgctctgtcaccaggttggagtgcagtggcgtgatctcagctcactgcaacctctgcctcctgggttcaagcaattctcctgcctcagcctcccaagtaactgggattacaggcatgcaccaccatgcccagctaatttttgtatttttagtagagacagggttttaccatgttggccaggatggtctcgatctcctgacctcgtgatccacctgcctcagcctcccaaagtgctgggattacaggcgtgagctaccgcgcccggcctattgtttttatttctaaagaggaaggaagattatttatttggaagataagttgtgaaagttacttcccagtttgccattggtcttttgactttgcctacaattttattttatttatttatttatttatttttatttttattttttgccaggaatgagttttaaagaatgtatcttttttatatttgtaatttgtcatcgttgtaatttcatgtgatctggatctttaggtacatgtttcacaatggatggaatagaaaagttaggaattttgtgtaggaaagcaaggaatagaatagaaaataaaatagaaaagttaggaattactttttatgtttgcattctctagctgctcactttttttgactatatttcaagccaactgtcacagggcatcattccaggtcctattttggtttctttcctcagtcaatactagaaaaccacagagtgccattcccggcatttcatctatcccatacttgtcatttgtaaaacaagtgcctagtgatgttaattatttctgtagagttgcatttatgctcttttaatttttctgtatttgtgctgaatttccatagtctgtggacagatttgctctgggtgctatagtcagctgagttggagtctagaccatttataacttaactcttcgacctatttaactgtctgcttccttgctcttagtttgagttactcaaattccagttgccttaactgtaaaattggctagtagagccatgtacctccagggaattcagtgtattgtttagatgatgattaggtcttatttatgttttcatataagctattataacaaaattgcagtttaaaatgaatatataggaaaatgttttctttagaaacttagaataaaccagaacattcttaaatttccacttattgcatgttgatggagcttgactctcttccctgtaaggatgaacattgcagaaagactgtgaaaaagtggtgccatcacatcatcagatctcttattgcagaagttataattctaagagaaaacaatctgcaataaggagttctatcatatttttgtaagtatattattgacttccaattaaaattagtcctagtaataatggcatctgtgaataaggaaatctgaaaccaataacgtgtaaaattgagttaaatattgttgagccagttatataagtcatgttaatttctaggtgttacaaacagaagaaagtgttctcaagcttctccgttccccagacagaatctgctgggttcctgctattgacatcaaagttacttgttctcccattaggctgctgttaaaacgaacacttaaaaattatcttttgtccatcatacttttgtgggaaacatttttctccaatggatttcaaatcccatatctcttactatggtatttccatccaattttcatggttttgaagcagagcaatcagtatggagtagggggatggagtgaaaatgataactttataattaaaatcggcacggaagggtttggatcacgggatggtgggattaaaggtgtaacctgtgaggacagtaacagaggagacccactggaaacattgtaggacttggagagcctgtcgggtgagtgccctggggatctttatgtgcccatttgtcattttcacttctagaagtgagaagcatcaggacactgtctgtgccacctctgtcttcccactctattccaaacctcctgggctggtaggagggctgaatgagataacacaaagcacttagaaccgtgtgtgacatgtattaggaactgaagaagagttagctattacacataacatttgattggtattaaataatataaacattgcttcctgtactctctattatataaataaagagcaaggaatggtgtgtaattctgtgaaactgtgtagtctcagatttggatctgtctttgcatgtgctgcttcctcctgccccagttagtaagtgtcaataatcatgtaaattcttttttttctttccttttcttttttcttttttttctttttgagacagagtcttgctctgttggccaggctggtgtgcaatggtgtgatattggctcactgcaacctctgcctcccaggctcaagcaattgtcatgcctcagtttccttagtagctgggattacaggtgtgtgctaccatgcttggctgattttttgtatttttagtagagacggggtttcaccatgttggcgaggctggtctcaaactccttaagcagtccacctgcctcggcctcccaaagtgctgggattacagacgtgacccagtgcacccaccaataatgtaaattcttactgaaacagtcatgcttgtgtaggtactgtctgtggtcacttttgttctacaatgacagagctgtgtagatgtgacagagattatacagcctgcaaaacaaaatacttagtatctggcctgttatagggcaagcttgccaactcttacatacagagtgttctgatccaaggaaaaagtaataaaaagtacccaattatagagcagcttcctgaaatcaacatttgttctttcttttacatctcctattgaagaataggatgttgtatataagaggatagcacaaaatgtttcctcaagttttcatttatgtcactgaagagttgactttaaagaattattataaattaataaaatgtaaccatttggaataagctatgtaaatgaatttgaaagtttgaagttgttgcttttctttagtaatgaaaaactaacccatgaaatgtgtggtagatttttcacttattaagagtaaatatgcgcatttatggcgtgcagtgtttcacttaagaaagtgggtatttcagggcagcacctagccactgctggtgtacagtgcggactgggagcacagtgccctaggcacaggcagcctgtgagtatccgtggcagttcgtttctaactagcaaaggaaaaggacttctaaaatcaatactggttttaaaatgtatcattactgttatttggctcagttggattcagagccataataaatagtatgaacatcggcctaagttaaagtttgcatttagacctgattgtgaatggaaagatgtacatatgacttgagagagtatggttttgacagagtggttgttaatgcctcagaactaaagaggtttcatgaatacataggttttcagtacagtctccttaccggcaggggaatatcagacaagtggtgtttttcagacagtgaagcagatggctctttctcttcagtacagggtgtaccaacaaagagagacagttacacaaatgttaacccctgagggagagagaaaacaattgcagtcagttgttctttataagtctgtatcttgacttcacagtggtgtgaaaaagtaatttcttcttttataaaaagcattaaatgcacaggagcagcctgtaatctgagtccaactaaaatggtggaagatgatgtaatcacttaaaaaggaaacagactgttatgtttgacatttctggagtaacgtggtggtggactacttgggcccgatataccgcttccaaattctcgttaaaacgtccagcagttgtgctataaagcaaattgccatatgccaagatctgggcagaatgttcttcaatatggctggtgaaacagattgcgaatggtcttggactatatagcacatgttctattctctgaactagaacaagacaaatgccccacgctgggtaggacatgttttaaaattcatgtacacagtgtgcatagctttgggaggccttgggtcatgctgagtggtccaagtttgtcattcccagtctgtggagccagtcatacctgggtccctcacctgctcctcctctgtctccactagctcctttctctccactttgacttaaaaacccaaactcccaacatgcagccccgcagcaggaggcagagggaggtgctaagggtgccgtccaaccctgactgcaaatcacttaaaagctttttgaaacggaggaagagccgtgcatccccgtgtttcgtgtacaacatatgatacatgtgacagttgacaagagtgcctgagtctcagagcaggaagagttatcctgcctccacatgcattgaagggaatatatgtcacacgttactagccaggctcagaggagaacacatctcatttacaagttcaaatctgaaagggagaaatgtgctagtatttagtggatcttgaggaaactagggatgtgttacccatctgtgcaggaacattagatctagatggggctctcctagtcaaaacgctgagcatgtggcgtaggaaaaaatttccaggatgcaggggaaggacagaatgacttggaggacagtgtctctctctgaaaatggttacatgtgaaacacaggtaacaaatttaggataaatctggtatcttaaaaaaagaaacatgactttgggaaaagaagaaaccagggggccctaagggggaaaagactgagatgaaaacagaaacatacaaacaaaaaagctgatcgaaataaaagaatgcgaggaaaccaaaactgcaatgagacttaaaatccctactaagataatcagaagacttgatctccaaaaatagaagaggagtatggatggcaaacttggacactctcaggatgcagaggagaaaaagataaaagtgggtaaatacgaaaggtagacgtggaggacagataatggatccttcacccaagaggagttcctgaacaggaaactgaagtcatctggaaaaccacaattaaattgactgcactgcagaagagtgtgagtaaatagcataagaaaccctgacagtcggccaaaattaacgaacagaggtttctacttagatctatcctcacaatttgaatttttaggataaaacaatcccaggagatagagcaggttgtgaagaaacacaggttaggtttgtctcaggtatcttgtctattaaatgctaggaatctgtaaggctgtggttcagtaactgtcatcagctacgttgttaacatacagtttacaggctattcagatgtaaaacaacagcatttatgttccattcaccccttaaaaagctacataaatatgagtttcatccacggaggagaccacccttagattttaggttatgtctctgactttgaagggagagagtctggagcagtgcgaagtcttacagcttcctgaccttttgggaggttgggaaatatttatgtgtgtcctgtgactggtagttagcagaaaaggctcccaagctagtccaacacaactgatcaggaagttgggtcatccaacagaaaatgtagcccacgttacagttagaaaattaaaaatccagggctaggcaaatgctttcttaaatatgatatgaaaagcacaagcaataaaaggaaaatgataaattgaacttaatcaaaatggaaaacctctgtgcttcagaacacgccctattgcctcttaccctgtgtaactaggagggagcccatctgaggacaattcaatacctcaggagggcagagcggaagagggcaagaccctgagctttgagaacgtcactgggcccccaaaatgaaccctgtaacttgctgtacctctgggttgattgttgtgtgagatggtcagtttctctgttgtgagagttggagtttgttacttgcagctgactacatccttagtgatccatgctgaaagaaaaagttaatgccagcccaggaagagagcacacagtgtaggagagcgtgcattgcaggctttactggcagaattgcaaatgtgtaaaggtgatggattttatttcaaaagccagagttacctaaattctcacattgtagaaacttgcttcagtctgtttcttatattcccaattttaaaatactttatacaagacataggaaaagaaaaatgcaggcttttgatgctgaaacttaaattttgtaaactaaaatccagtggttaatttgaaaagtaacatcaagtagagtttattctatgctcaatattaagaattattgcttagtattaagaaatttcctatacggatgtagtgtgttttacagtggcgctatgtccttataaactgataagctgaaaatattgtaagttgaaaatgcatacacctaacctactgaacatcatagcctagcctaccctaccttaaacgtgctcagagcacttacattagcctagaagggcagaatcacctaacacgaatcctgtcttataatcaagtgttgaaagtctcatataatttattgaacactaagcgaaagtgaagaacagaatggttgtatgggtcccattgcaaagttgaaaaattgcaagtcaggttctctctgtaattcaaattatgaacaagtcaatgacagaaaaccatatggtctcaatagatgttagggaggtacttgacaaaacttaacatctatcccttctaaaaagaaaatcccttagtaaaaggattgaaaggtgttttccatcttaacatagtcaaaggtgtgttgcaaattaatagtcaacatcatttatgacagtgaaaccctagaaacatttaagcttcccaaataaggttgttggcaacaccattaaaaatgttctgttctttttttttttggatgtgcgatactttacttggcactaaaaagtaaatactaaatgacaagagaaagcaaaattgttatttgaagatattatatgattagaaaaacaaaggtcaacagacaaatggttagaagcaatttaataaaagtgcttgttcacaaattcagtgtacaaacttcagtagcttttgtatatattaaccatttataatcaacaacaaagaagacctcattcacaatcacaagcccaaaaacttgaaataaacttgataagtacatgatttatatgaagaaaaccataaaactttaaagaggatctttaaaaagtttgaaaacatgaagtcatactttgttttaacataagaatagctaactttgtaaaatgccatgtttctttgctctgtaaattaaatgtcatctcagtccaaattgtggatttttcttttttttaacttgacactctgatatccacggtaattggagcaatggaagtcttggatttgctgcagtgtgttttgcatagttgaaggactggggaattgggggagagctgagtctggaatcaggaacccactgttgcctaaagtggctcactccttatgagcaataccaccccacttaactgatctgaagttttccacttgggatatgttccttttctggaagacttgtgacttctgcccccaagctgtgcacaggaggactcactgtcatcagatgctgtggttacacaaaatatttttttctacaattgattttcttcacataaatcgtgtacttgtcaagtctttggaggttgggttgccttactgtagtgtcatagccagtcacagacctggcagcagtgcattgtaactctgaaagcccttcagtggctgccaccagaaggtctctctcctgcatactcctttggccactatacaggtcttccaatttaacctacactatatttttactggccttttttccagtgctttgaataaggtacgtttttccccaccccagaacctttacatattctgttccctctgcctagaccaatttctaaccatgctctgctcctccagtccccactacacacacccacacccccacacccccggtcaactctaattcacctttcaggtctcagattcagtaatatttcttcaaagagactttttaaaatttttcagaattgattaggtccccttgttatgcccattatttcagattgtatgctttttttcccacagcacttaggtgtaatcatgtattttatgcagtttctttatagtctgtcactcccattgaaggacacagactgtgtctctttagttcactatcgtatatctaacacctgtaattgtatgtgccacatagtagacattcgttaaatattttttagtgaattaatgtgcagtgattttaagcaagtattagttgaataacgttttacatgtttaatgatgctgcatacgcattttccgatagtgtctaccacggtttatcacagaggccagtgtgggctctcacatgtaataaagctaatctgaagttaatttgcaaaaaaaaaaaaaaattgtgcattgtgagaaaattttagaaaacaaacactagtggagacttgcctttacatgtcacaaacttatgctaaagctgtaattgttaaatcagtataatactgacccaggactagacagaaaatgaaataaagtctagaagtaagcccaagtacatatgggggtttagtgtgtgttcaatgtatttcattttaaagtagtgtaaaatagatggttggttatcagcctgcaagttggctcccagtgatcattgccttgtagtattcttatccgtgtatagactctccttacatgtgtagggctgacctgtgtaaccagtaggatagaatgaagaggatagtgtgtgacttccaagggtaaatcatacaagacattgtaacctctgtcttgtgctcccttgcatcatttgctcttgggggagctggctacctttcgtgaggacactcaagcaactctgtggagaagtccttgtggagaggaactgaggccttggtcaaccgccaccatcaacttgcctgccatgtgggtgagccatctgggaagtggatcctccagccccagggaagccttcagatgacggcagctctgggaggcatcttgcctgcaacctcatgtggatacagctaaaccagagccacagaactaagctgctcctgaatttctgactcacagaaatggtgtgagaaaatgctgattgctgttttaagccatgaagttttggggtaattcatatacagcaataagtaactgatcagatggattattcagtcagtggtgtggggatagccagctagaattggggaaaaaataagttggattcttactgaattctgcatcaagaaaattccagatgtgctgggcatggtagcttatgcctgcaatcctagtgctttgggaggctgaggtaggaggattgcttgggcccaggagtttgaggctgcagtgagccatgatcatgcctctgcactccagcccgggtgacagagtgagaccctgccttgggggaaaaaaagaaaatctcagatggatcaaatatttaaatgtaaaaatggaaccgttaatttattataagcctgaaaaattttaaacttttggggtggagaaggatttcctaactatgaatatgcaatccccaagccataaattaaaataacaaaccttataaacagggtgaaagataaaccaccaattaggaagatttgagcaacctgtattacaaaaggcagtgtctcggagaactcttaaaaatcagtaagaagactctataaatgggatggctgaggacacgaacaggcaattcacaaagtagaaataaatgtatgaacagatattagccaagaaatataatttagaacaatgagaggtcacattgtatttaccagattcacagaggtgaaaaagaccgacaaggttaaagagattccttgattggcaggaagattatacggtgtgggtggggacacagatttgtctgacttttctggagggcagtctagtaacatgtctcaaaatgcaaataccaaatgagtgcacattgattcagctattgtgtaaatttatgctaaggtaatcggacacacacagaaagatgtgtatactgttaaaaaaaaatcccgaatttcaaaaatgtcaaattttcttcctttttcttttctttctttttttcctctatttccccttctattgtctctctttccagttcctcttggactttcctggatctgtctccacttctcaacattgtactcataccttttaaatcttggtttcttctcaatattagtaatttctttaattttaacttccttgttgccaactctctattctgaaatcgattctaacattcagccctgcttcgaaaagtttattttggcaattacttttgcaaaactaatttctgataaattttttcttttaggattctgttctgtagtgggtgtatagctgttcaatctctctgaggatatgaattagagttttaaaaacttgccttagacacgttgattgtggctgtttctcccagggtttgtggctgtgtgtcttcatcttgctccttccctcccatgctttaagatcttcaagtcctgatggtcctcagctaaatatccatgtttaacgataaaggactaggttaattaatactgcagctgccgcaggttttctctgtagttgtgtggacattccagctgccccctgcgctaaatggaggatggactgcaggctctggaatgtggtcaggttgcttggcaagcttccccgtggggtgctgtttgggtggggaaagctgggttccccccacactgctatcataagcagtacttggtcaggaggtgcagcagtgtaccctgtcaggcagagctgctgcttttcatcccacgactccccgtctctgtgtctgttgtaacagttctgagttccctttgttctctctcaagccctaatgtccacacctgaagctctccacagagaactcatccatgttgggttcctttttcactgccacacacagggcagggggctgtgtgtgggggtgcttcctagccacgctgttccaaactatatttttattttatcatttatttattatatatttatttttggagacagagtctcactctgttgcccaggctggagtgcagtggcacgatctcggctcactgcaacctccgcctcctgggctcaagcaattctcctgcgtcagcctcccgagtagctgggattacaggtgcacgccaccatgcccagctaatttttgtattttagtaaagatgggggtttcaccatgttggccaggctggtcttgaactcctgggctcaagtgatccgcctgcctcggcttcccaaagtgctgggattacaggcatgaaccactgcgccggcccccaaactctatttttaaatcaacttcttgttgagccactcttgcctgtatttgttggctctgagcttctcttggatcccttgagaactgctctcagtcatctttcgggggctacaattaacattgttctgtcttccaagagtccctcatagttttggtctcacatattttgtgttttctaggcattccataaaatatatggtctgctgatggcactggttttttgtcttgcaggattctttaattctacttaaaaacaaaagtccttgttagttcataagaccttgggtgggacgggaggtagacatttgtgctcagatgacctgttcttttttctgtgggtgttatcacttgcgtttcttcgagcatattcactttgacattttcttctgcttactgtatcagccatgtacccaggggtcaggagtgtacacatacacatgaggaaaccttgaggtcgggcagggatttggatccaggctgtgactccaaagcctgccctcttaacctctctgctgtctcttctgtttgtgcagtggggggccctctttcatgctgtttgtttacttcaaaggcttggtgtttcttgtatttctgttcacatttgtaggtaaggatctgcaactcagcgttgcgtgaaggttctcacgcaggagctcagcttcaggtgactttgcaggggaagggcagggagcatatagcggggcagggtattcactctgctgccctgctcgctggggggccggcggggtgggcttctgctccacggagttggtcactttgtcggctctgctgtcttccttgttaggacctctcatcggagagttgcatgcatgctcaccgacctcccaccccttccccggagcagacccctgagtcagacagttcaaacgaggacttgctcagctcttccagcttctcgttaattacttggccaattatctatggcctgcttctcctggcctgtgctgcactgataatgggattatgctgagcttctgctgaggaaacttttcaactgacatgggttccttctatttctttagatttgccatcattggtcccgtcacttttctagaaatttaatctgttccacaactctttattgtgcggggcaatgtgctgggcattagaaaataatggtgaagagaagacctgtcacgatggagcttatgtatggtcttgttggggagacaggcattaaacaattaatttgcacacacgtagttcttgttctgtgaggagaagttgccctgcgctgagggggcatatgaaaaggctaacttactgggagaggggttgccatggaagtccacctggagcacgtgtgacaattgacctgagattccaaggaagaaaaggagtgactcagtgaccgggaatggggataagagtgttccaagctttggaaacaggatggggaaagacctttattcgtagatggaggggaacggggtctgccagcatcactcctcaaggacatttactattgctgtggttcattttcattctgtatttttcttctgtttaatgggatttgggaggaagaaaaagatgaacttggttttgatccaagtaacctcagagaataatgacgtgggagcattttacaatgcaaacaataaatggaaaagcatgaatttatgtactgtatgtgaaatatatagacacatacatacatataggctgaacatcccaaatccgaaatttgcaatgttccaaaatccaaaacttcttgagccacctacatgatgctcaaactgagtgctcattggagcatttcagatttcgtatttttctatttgggatgctcagctagttgatatgaggcagatattcccaaatctgaaaaagattcaaaacctaatccaaaaatccaaaggctctctggtcctgaacctttcagataagggattttcaacctgtatttaatattgggaagcaatataccaataccaaaaacgttgtctgtgagaggtgagatgacaaatgatttttattacctttttaaaactcctaatttgaatttcaacttttctatgactgtggattgtttttataatcagaaaaaaagttcctaaaatgatgtttatcttatggtttggcttatgtaaatgcagagtttgtcactaggtcaatatccgcaacattataaagatgttactgtgtacttactggaaatggcctgtgattggtgacaaagctgacttacacaaaggagaacattatccttaggaattcttgctagtatctcataatgtaattgttttaacgttgttaaatggttcacagtgatcagagacttaaaatctttgtctcctacacagcgttttaagagttacagaaaagctatcattttgagctaccttgagactgaagtgtctgcagaatagcacttacatattcaggctgacaatatgtgtttgaggaattggcggttcagtttggccaactttggtgttgtaacacttgagattgtattaagctgcaagtaacaaattcagatgaacagttgcttaaccaagtaacttaaaggcacaagctttaagcttttaacgttttcaagttcaggtcatgtaggggagctatgtcattaaggagactgactctttctgtcttcttgatttactgtagagtacggcttttgacctcatcataacagagtggctgctgcccctctagaaactccatctgtgattcaggcgaaagggaagggcctgctagttggcttgtcctttttattttttatcagaaaaatagtagctttcaaagaaaccacccccattagacttccgtttatatttcagtgaccagaactgtgagaaagccgtctttagctgcaaggaaacctgagaaatcaagcttttgtggttatgtttttcaaactggagcacattgctgttcaaaacaaaatcagagttctgttaataaataaggagagaatggatattggtaggcaacttgctgtgtcagctgcaggagttatgtgcttagaggtggtaattgaagtcaagagtgtgattaacattactcagggggagtatacagagtaagaagagaatccatgaagggactgaaaggaagtttagtgttgaagagactggcagaagaataggtattctcaaagggaaccaagaacgaggggcaagtgggaggaggtggtcacctggagggtgtggaccagtggtacacaggttaggagagggggaagggcagagtttacattgcccgtatgctggcgagtgaagtccactaggaactgagacatgaacttgaggcttagcaaaagagagcgacttagagaaagagcacccgcactggtgactgtgggctgcatggtgaaggggggcaaagcagtgacagcgggagtgagcccctctcaaaaactgatgccaactacgcaggacagagagggggcggggaagggggagtgacctgagggagactggggctcaagaaaagcctttttgtgttggttgttttaaaggctggcgatactgtagcatgcttagttctaaggagaggaagggccattaaagacgtttgagaaggatcctagaaggattgtattttccaacggaggtggaaggggttgagatccacagcccaggggatatgctttgaaggaaggagaaaagcacctctccttccctaaaagaaggcaggaaaggtgtgtggacagaaattctagagagcatgaaatgcgggtaattgggctgcaataagaatccagtcatggttagagaacctgaatttaattaaggtcagtgtatgtctgtagagtgccattatcttacatagaaattatttttgaaaattttagttgacatttttgaatgatacctactagtactacagataatagaagcataaatatgcacaaaagcagttaaaacttaaccgttcgtcttaaagtaatttataactaatacttattgatgccctactctgtctcagtcaaaaagctaaacaccttccctatgcacaagaaaaacctatgcagtaggcgttactagttgtcctcattttatttttattttttattttttttcaaacttaaacatttttttttgtgtagagacagggtctacctttgtttcccaggctggtctccaactcctgggctcaagtgatcctcccgcctctgcctcccaaagtgctgggattacaggcatgaaccatagcacccaccctttatccccattttaaagatgacaaaacctaggctcaaagaacttaacatgttctagatcacgtggctagtaagtggtgacaccagaatttgaaccacgtatctgactccagagtggtggtgccagctgctgttctgtggattgagccatatgaaattgactatttagcaagagaaatataaaacatcggcatttttatatgtctctacctaatacacttcctcacctcaatcattgccaaggtcagtggactgcttacttggtgccaggcattgccctaagtgttttgattgccataatctgttgtaatattttgaaatatttgcagtcttaattgtcctgatttaaaaaatcatgtttttgaatatgataatatactttaaatgagtatgtttgattagcgatgttgctttttcctatgttggcaaaattatattttgaggaaacgattagaaatattggcaaaacatagagaaaaatcattacacatctagtgtctcacaacatgaatagttttttggggcatttttcacaacatctgattcattgagtggtagtcccccaagagatacctgtgaattggtttttaattcagtagatttctgttttattgtatatttgttgacttgtgatcaacatatattctcttctatttttgaagcttattttgggtaaaaagaaagattacctttctatcttctcactttatccccaacttatgaataccataggtatcaaccagtgatattactagcaaatcacccactctcccactttactaataaaatgttgtcttgaattcttgcatttccgctaaaaaaaatcccattcaaaattatgaatttagaaatgggatgaaagctgagtgcagtggctcaggcctataatcctggcaatttgaaaggctgaggtggggggatcaattgagccaagaatgtgagaccagcctgggcaatagtgagaccctgtcactaccaaaacataacaaaaattagcctggtgtggtggcatgtgcctgtggttccagctactagggagactgagatggaaggatcacttgagccccagaggttaagattgcagtgaattatgattgtgccactgcactccagcctgggtgacagcgagaccctgtttctattaaaaaaacacatggggtgatttccctctccccagtttggaagtcttcaataaaaggataaaaagatgtgaagcggttttagccatctctttttggcctccatgtaatcagattttgtgcttatttgagacacttaaaaagtatctggctaattgtgctctctgttttgaggacctgatcttaaactggatggtcttgatattttcgtgtaacttttagttcaggtacaagaattctttaaagaggcatggacaattaattacacgactgagaaaaataatttcccccaagttaattgcacaaattactgtagccctaaaaggttaatgattatcaaacatctttgatgcatagagcctattaaatgccagtatcatttgaataatttaactagagtagtcctttcacaaatgggtctcatccaaaggacaacagtaaatagtgcctttaaaaatattttctctttagagaaacgtgttcaaacccttcagctggagtcaatcttatgggtcacaacacattcttacatttcagaatataagacattaaaacattttatattttaaatgatttagatcatttattatccttatagaactactgaggttttacttgaagcttgtaagttaaatttttgtattttatacagagttagcttaggccgtgattaggtagaaataatgggcagttatcactgtatttatttgaaatgaaacttcttttacagctattcatggaagaaaactttaatattgtattaaagcttttattttatctttaaatgccaactttattatgtatttcttaaaattgatcttccagtattttttatgtatactttttagtgctttatagttattagcaggttccacagtagtaactgaaatatactctgattttcatttttattttataaaactttgatttttaataacatatgctgaaggacactctgaagagtactaatttttttcagggatgcttttccaaaaaggattctgtggttcaataaacttgggaaagactgcgtcctatatgcttttagaagagtcacagtgtatactcacatactgaaggatttgagaaatgctagagcaaataaatctaacgttgtctaacccagtgtttcccaagcttgtctgaagacagacatttccactcttgttttacatcataccctcgaacatcgaaggacttcgctgatttgtgttctacacaaccgtcttgagatacgctgttagattagctgtagcttcccttgccacatcgcgaatttccagcattcaaatgcagcaggcatgtttatctgctgcacttacacctacgtgtacatatgtatataaatataccagtatacatcaatatgtacatttgaagcgtatatgcacacttacataggtacacacatatatgtatgcttgtatttttattttacttactgcagtacccgtagtatatagcagatagtgaaatcagaaaataattgttgagtaaatggatgagagagtttcaccagtctgtggcatacgccctgctgccttcttcaggatgcagaaaaccctgtcccctggcttaaagtgtgacattctggagaaagtagatgtgctctctctagagacacctgaaacatcaaacacaaacagtttgtcagtactgtttcaatattaagtctgtcagagggaaaagaccctgaattttgggtcaggagacctgggttcaggtatggattctaccactttccactcacgtcatcttaggcaagttatgggctttttctgagcctcagtttttctcctctatgaattgataataccttgtaagactgttgaaatatctatagaagacatcaaaaacttatttttaaccaattggaaggtacgctgtgaatgtattatcctgatacaggtgaaagctttattaaaaaacaaatgtaacttaacatttccatttcatatatataggggaagaaaattcccattttttggtgaagatactaattttcataagtaatgaacataaaaaaatatatttttttactgttagcagacaataattttttttctactgtttaaaaacttccatcctttttttctaataaaaaaactccagaatcttcctggattagcctcagacccatcgcacctgctggtctctctgcctggaatcttctttaaaacaaggtgacttgccatttctttccatcttatttcagctctcagtcaacctctcacttccctgcccaccaaaatacagcccccgtatgtatctctttatccctttacctactttattttcctttataattcttatcagacattttattgcacatatcattagtgaggtgagatggagatcatattttgtggcgattagtaagggattgtaatatctctcaataacaaaattgctttagaccaaatttttgtttgcttatatgatttttacacccattatttcagcactttaatgactctgtcagatgtataggttagttagtagtcatacttctgtaaaattctctagtagaatcaaaatacatgtgctctccctttcctctgcatggattttttttttccacatgagggaagctgtggtaaataatgttatagattttcactcgttagtaatattactcaaataaacgatgggaaaatgtttctcttgacaggattgagtaggtagacataggaattcatggaaccacttatgttaaaattgataactttaaaaaaaattggatagcagaaataagacttgttttatgtattagcatccagccaaattatcataactgattgtgtagtgtaaggttagtgatacaaagatgtgcaagatttggttttatactttatctattagaagtttgggtttggtgatacttttaataccatgcagattgcagttttagctatcatgaatttctgaatattttatgtaaaacaaagatgttgcctttaaaagagttaaagttgaagttttttaggctagaatgtgatttagctttatatagctttttgtcagactcttggaatcatttcaaaacacactcatattttgtttagagttaacagagctgtctagaagtaatttctagtttctcctaggctactcatgatgtttgaattattttccgtattctctgctgagagattcttgtggaagtagactttctgagcttctataaacattttccttctggaactatgcccagtccacctgttcaccatttacagggaaatgctgctttcctaatgaaaatcaagcccagattttccagttcagcttctgtaggtagggagtgcagctgtactgggcagcctccagtgagtcccggggacttgacttcttgcaggttttctgctgatggcagctgctatcaccatgtttatcttttgggggactggatgctgctccttcttcaacgttttggcccaagagtagacaacatatgtcataactaacacaaggctgtcatgtttaaagacatctttactgaatgctgcagaggaataaagagaggaaaacccagagagctccatgaatcatgaattcaggcattctaactttagagctatggcacattcatcttcagttagttgagatggttgcttgcatgtaagtggcttttcacatttcaaaaatggtttcccaagtgagcatatgtttactcttggctgacacgcctctgaaccagccccaagttggtgtgcatggtgctagggcatgatttcaggcccgactcatacccccaagctagacacctttgtgcagagtacatctatatgtgtactagggattgcctactgaggtttttcctagttctccctttaccttcagaaggcatagagcacctttaatagccctcctgccttggccctcatcctccctccccaccaacccctgaattcctttagagattcctcatctcctcaaagtccagaggtgggctgtcttctcccacctccttgtaggagctcaccctgatgaaggttatttcatttctgaagctctgtctcctttttggcaactggcaccagcaaggatcagatccttctaaaactgtctcctgtttataacagaatctgacacttccaacatcatgtaagagctgcatatgccaatcacagtggagtttttaatcctgtacccaggtctgttgtgaggataaatggtaattcccattgcatttttgtgtgtgataaagtatattgcttaagagagttctggggatgtatagtggtgatgattacacaacgatgtgaatgtatgtagtatcactgaactgtacatttaatgtttaaggtggtaatcttttgttacctgtctattaccacaataaaaatggaaaaatatattgcttaataaaataatacttgataaagtccatgcagtgtttactacatgtcagtaccattttgaacattgtacacgttgcggtttacttaatcctcacaacaaccctgttaagtagctaatattataatccttatttgacacatgagaaaaatgtgctacatagaagttacataatttgctattaagtgagagaacgagattcaaaccaaagttgtttagctccatagctcatgctgtcaaccactatgttaatacaaatctgcattgtcctaattttattctatatttatgttcagatagaaggcactctgggaatctggagactggggttctcagttctggctctgtgactgcaccacatttgtgactgtgaccagagtagcttctctagtcttcagttattttagttataaaatgagatgggataaggttcactgttaaatttctatttataaatgctgtggatgtgtatatatttttatgtatgtaaagttctgaggttgaataagccttattttctctgtggtctaaaccatacctatggaatctcatctgtcaaacgctatgtgattgaagattaaaaaaaaaatctcatctgtcaaacgctatgtgattgaagattaaaaaaaaaaaaggaaaattttatttgaagagactgggtctcattttgttgcccagacttgagtgcagtggcaagatcatagctcattgtattctcaaactcctaggctcaagcgatccccccatcttagcttcccaaagaattgttattaaatctcatttagaaaagttgaatttctcaaatattaactttgatgatataatactcaccacataagtagtagttgtgtgtactttctagtttgaaacgtataagctgtttcgtgcattagtggagatgagatattaaaaattattccttgacatttttaagagttgataaagggagaattttataaagtatgatatatgtaactatattatattatgggatgcaattttaaatgagatttctgtcacactaagtcaacgtgtgtttatcgagtacctactgtgtcaggcacatgcttgatgctagagtatacagatgataaagagaaggtggcctgcccaaatggagtttacattccagtgggaaagctggtaatcaacaagtaaacaaatgagagaatacaattaatagcagccgtgatacctgctggaaaggaaatagcattatcctgtgatacagaatcactgatggggtcaactttttggtagcgtagtttggaaaggcctctcaggaaatgacattttaagtaaaagctgacagaaggaccacaaggaatgagtggtgggaggaataagggcagatgtaaaggagtggggggagaatagcattctagacaaatgtggaaggctaaataatgttaccccaatgatgtccaggttctaattcctagaaccagtgaatgttaccttcagtgataaaatgagactacagatatgattaagttaaagattttgagatggagagattatcctggattatctgggtgggctccaaatacaattacaagtgaccttataagagagaggaaacaggatatttaactaaagagaagacaactacgagacataaacagagcaaagcagagtcagagaaaatgctacacctctggtattgaagttggaggaatgggccatgagccaaggacaagggagtgtagctctaccatcaccttcactgtcattcctttagactcatattttggacttctggcctctaggactgtaagataataaaggtatgttattttaagccataggtctattgtagtttgttacagcagcaacagaaaactaatacaggataggtgtggtggctcaagtctgtagtccaagctactcaggaggctgaggcaggggaattgcttgagcctgggaggtagagggagcagtgagctgtgatcgtgccactgcactccacagcctgggcaacagaaataaacaaaaacaaaaaactaacgtggaagttggtacctggaggtggggtgctgtggtaacaaatatctgaaaatgtggaagcagctttagaagtggtgattgagtagaggcttgaaaaattttgaggtacatgattaaaaaaccccaggttgccttgaacagactgttcaagtgtttaatgtagatattaaagactgctggtgagggcttagaaggaaatgagcttgttattggtaagtgggggaaagtggatcattgttatatagtggcagaaactgtagctgaattgtgtcttagagctctacggaaagcagaatttgtaagtgatgaagttggctatttaggaggagatttccaagcaaattgttgaaggtactgcttggattcttcttgctgcttatagtaaaatgtgagaagaaattctaactgtggtctgcagcttcagcttcatgccggagggttccagggtgccctttctgacagcctgccctacaaactatactttgaatagcagggttgtagagaatcatatttattcatttagaatgtcaaatatatctctataaaagagtttagctttgctcatcagccttttaaatgtttaccactgacagtgacttcactgatctaattacagttatcgaagccaatattgtaagaactgtgcatcctcttattgtgcacaattgatctggaagcatctttcctataccgagttaaatagtgtcaccccagaaaagttattttcacctatgaatgtgagtttatttggaaattgggcttttgcagatgtaattaaataagatgaggtcatacaggattagaccggactataatccaatgactagtatccttatatgatgagggggctttggacatagggacacatagggagagtgccatgtgcagatagacgcagatattggagttatgctgccgaagtcaataatgccaagtattgttggaaccaccagaagctaggagagaggtggaacaaattctccctttgagccctcaggaaggaaccaaagctactgaaacttgatcttggacttctggcctccagagctgagagaataaatatctgttgttttaggacattcagtttgtggcattttgttatggtagccctaggaaatgaatatgtcttctgacaagtaaaagtaaaatagtggactctaacaaattaatttttaagcacccaacagaaaatgtcactcttccacagagccaatgtctatactatggctgttttccagttttggagttctggaagtttgttagctaccattgctctttgagtaattcttaaaccttttataccaggtcacatttagaatagaatataaaaaccttggacacaaaatcaaagttcataccagatcaagaggggacaaaaatggactagaaggaaggttacataaagtggtactatgtcttctgcaatttgtttgttttcttgtaatatttgccctgagctcaccagcgaaataatagatagactccatagaagtcaactcttaaaaatgacttttctgtcattctttacctccatcctatcaagcacacatgaccttggttccattgtgcaggacttaggaacacactttgaatgtaagcagtttcttctagcattgctggaagtaaaaggatgcctcatcttaaggaatagagttgtttctggaggtcttgcttaagcgtacatttggaagtgattttttttttcctttacgttttctgttgtagaataaaaaatttctttccacaaaggaattattatacccaaaatatgtttaaaaacaatttaaaagtatatatatgtacagtggcactggctttcagagaaaagaataaaagtatatacatgtatcctgttaactgatttttttttttttttttttgagacagggtcttgctctgtctcctgggttagagtgcagtggcatgatcatggctcactgcaacctccgcttgccaggtttaagtgatcctcctgtctcagcctcccgagtagctggtgtgtgccataatgcctggctaatttttgtatttttttgtagaggtgaggttttgctatgttgcccaggctggtctcaaactcctgagctcaagcaatgcacctgcgttgccctcccaaagtgatgggatcacaggtgtcaaccgccatgtttggccaacaactgaaatatttttaaaagtatgtatatcatgtaatatatatatatatatatatatgcatgctacctaagcttaaatgcaacaaagaccatacaaggcttttatggagacaaataaatgcacctgtgtaccacattcatgatagaaagtattagtattataaagatgcccatcatgtccacattaatccataaattcagttctaatcagtaactgaacgcttaaaacctttgcataacagacattttcaaactttacagaagtaaagagaaaagcatgatgaaccccatgtactctagcaaattccacttgtgaccaatgatttcttagaaatgtatcattattaacttatgagactttaaaatacacttgaggtatttaattcatgtcattcgtttttattgaaactcaaattgtcaaatctttgtccaattgtggtgcctttaagttggatcttgtgaccttttgacatgactccattagttttcttttatatatacttttatggtggtaaaatatatatacacacatatagcatagaatttgtcattttaaccatttaaaaagtgcagttcagtgacattcattgtattcagtgttgtatggccatcaccattatttatttccaaaacgtctttgtcatttcaaacagaaactgcaacttctaagcaataatttcccatttcttcctccctccaaccctggtaacttctaatctcctttttgtctttatgaatttgtctactctaggtatttatgtaaaatcatacaacacatatctttttttacctaacttatttaataattttattttcatgatgttttcaagattcattcatattatagcatgtaacagaacttaattccttttttggctgaataataatattccagtgtatgcgtatatcgcatttcgtgtattcattcatttgttgatggacacttgggttgttgcctccttttggctattgcaaatattgctcatgatgaacattggcttacaggtatctgtttgagtccctgttttaaatttttttttttttttttttcttttttgagatggagttttgctcttgttccccaggctgtagtacagtggcgtgatctcagctcactgcaatctccgcctcctaggttcaagcgattgtcctgtctcagtctcctgagtagctgagattacaggtgcctgccaccacgcctggctaattttttgtatttttagtagaggtggggtttcatcatgttggccagcctggtcttgaactcctgacctcaggtgatccacctacctcagcctcccacagtgctgggattacaggtataagccaccacacccggcccctattttcagttcttttggatgtatacccaggagtgaagttgttcaatcatatgataattctgtgtttagctttatgaggaaatgccaaaatgtttttcacagtggctgcaccattatactacttaacagaaatgtttgagagttccaacttttttacattcttgccaacatgttatttttaattttcctttcctatagctatgtgaagtggtatctgtacagaaatgttcattgcagcacagtcaagtgaaaaacaactcaagggaatatcgggaaagagtagataaaactggattattcgcagatcagaatactacgtagcagttaaaatgaatgggctacaagttaaaatgaatgtgattctgttgcattcttcagtacttcagttacatttttcaactccagaatttctgcttgattctttttaattatttcaatctctgttaaatttatctgatagtattctgaattttttctctgtgttttcttgaatttgagtttcttcaaaacagctattttgagttcttgaaaggtcatgtatatctgtttcttaaggattgttcactgttgtcttatttagttcagtttgtgaggtcgtgttttcccggatggtcttgatgcttgtggatgtttgtcagtatctgagctttaaagagttaggcatttattatagtgttcatcatttgggcttatttgtacccatccttcttgggaaggctttccagatattcaaaaggagttgggtaagccatatctgcattagggggcaccctaaggccagtaacactggttcttgcagacttctataggtactgtcttggtagtcttggataagatccagaagaactctctggattaccagacagagatattgttctcctccttttctcccaaacacatggagtcagtctctcctctacttctcccccgaccctcattttgagttaactttgtgtagggtctaagatcatctttttgcatgtggatatccaattgttctggttttatttggtgaacgtattatctattccctagtgtattgccttggcatgtttgttaaaaatcagtggataataaatataagaatttattgctggattcgtaattatgtgccattgatcaatgatttttattagtactataatgctttgatcactgtacctttatataagatttgaaatttagaaaagacctccagttttttttcaaaattgttttgattattctaaatgttttgcattttcatttgcattttaggacctgcttatcaatttctgtgggaataagcctcctggaatttgatagggattattttgaatgtatagatcaatttggggagaattgccattttaacaatattgagtctttcgatccataaatattgaatgtctcatcatttaaaaaaacttgaattttcttcaaagctttataatttttacagtacaagtcttgttcttatgttacctttatttgtatgtacttttttaatgctattgtgaatgtgtctcttaattttacttccagattgtttattgcttatagaaatataattgatttttatatattgatcttgtattatatcctgtgaactagatgtgctttttaaaaattagttctaatagtttttttgtggactctttggggttttctatatacaggatcatgtcatcttcaaacaaagacagttttaccactttctttacaaaccgaatgtcttttatttgtttttcttgggtggttagagcttccagtgctgtgctgaatagaggagatgagagtggacatctgtgccttttaccctgtcttagaggaaaagaatttggtctttcaccaatatgtattatattcactgtaggttttttgcacatgttaccaggttctattctaaggttgctgagactttttatcttgaatgcacattggattttgtcaaatgttttctctgtacctgttgagatgttcatttggtttttattctgtattaatatgatgcattactttaattgatttttagctgttaaaacctcacatttctggggtaattaaaaaagatggcttatcatctttttttatatgttgttgaatttggttcactaatattttattgaggatttttgcatctgtgtttgtgagagatactggtttgtagttttcctttctggtaataatttgtctcgctttgctatcagggtgttattgcatcccataatgagtgggaatattctagaatgagatgtgagtaatattcttaaatctacttcttatacttctcggaagaatttgtggagtattaatattatttcctccttcagtgtttgatgaaattccccagtgaaggaatctgagcctggacttttctttgtgggaacatattttaaaagctcatttaatttttgtacttgctgtagatgtattgagattttctattccttctttagtcagttttggtcattcgtgactttttaggaatttgtctatttaagttgttgaatttgttggcgtaaagttgttaatatttctttgtctttctaatctgtgaggggtcagtggtaatcatctctctttcattcctgatttttgtggttttctttctctctctctttgccaagggtttgccaattttgtttttaaagaaccaccttttaatttttcctctgttgtttttctgttttacatttctttaatttctcctgtcatctttattttcttcattctgttttcccttgatatggtttagtcttctgttttctacattttaaaggtgaattcttagattattgatttgagatttttttctttaatataggaatgttaacactatacgtttttttctaagtcttgtgttagctgcatctcatacacttggacatgagttgtatttctattattcagattaaaatacttgctcattcccccttgtaattttaaaaaaatttttctttgacccgtatttagaaataactgcattattgttggtaaatatactttatacgattttaatccttttaaatctgctaatgctttctttgtggtccagcatatgacttatcttgggttctatggcagcttgaaaagaatgattattttgctgctgttgtgtggagtgtgctttagatgtgtgttaaggtaagttgattggcagtgttataagtcttctgtatttttgttgatcttctgtctacttgttctattcattattgaaaattgaaatgttcaactattgtttctctttaattttgtcagttttagttttatgtattttggacccctgttactgcatacatatttataaattgttatctttacctgctgaattaccctcttattataaaatttccttttctttctagtaacaatttttgtctttaaattcattttgtctgatattaatatagctgtcctctgattactgttttcatgatatatcttttcccatccttttgttttcaactgatctgtatctttgtatctaatgtgaatctcttccagacagcatatggttgtcaagtttatttttctcagtctatactgttaatctgcaccttttgattagatggtctaattcatttatatttatttatatttaatgtaattattaagatttaagtataccttttcattatatgttttctataaatgttatatattttttgttccttcattcctccatgactgctttcttttgtgttaaatggattcttttcttaaatgcatcattcttgttgtttcttttagtatatattttgagttactttcttagtggttatcctggggatcataacaaataacttaaaattcagttcaggttaatcctggcataatttcaaacatacacagaattttttctcacttgcatgctttttttgccttataaattatgtatttatatgttataagcctatcaacaaagttttataattattgctttatacagttgccttttaaaacaaataggagaaaagcgttctcaaaaacaattatattgtattttatatttacctatttaattgcctttattggtactttcaaatttttttcatatggatttgaattacttcagctggaagtaatcctttagtgtttcttgtagagcaattctgctggtgacaaattctctcattttttctttatatgggaatattttaattttcgtttttgaaggatagttttgctggatatataatttttggttcgtagtcttttctttcccccccccagcgctttgaatatgtcacatcagtgccttctggtctttatggtttctaacaagaagtcagctgttaatcttatagaggattccctgtaatatgcaagtcattttttctgttgttttacagattctgtctttgaacattttgtcttaatgtgtgtttgactctttgagttaccctatttggagttcattgaacttcttggatatgtaatttaatgtttctcatcaaactagacatttttggctatcatttctgttgtagtgtttttgcggtttttaaaaatttgttcttagggtttttatctctgcttacattacccacctcttcttgcatgttttacacttttttccattagagcttttggcatattaatcatagttatgaatttctggtttgataattacataatctctgccatatatgagtctgattctgatgcttgctttgccccttcagattgtgtgttttcttgcctttcagcatgccttgtaattttttgtggaaagccaggcatgatgtactgagtagcaggaactgaagtagtaaataggtcttcagtgtgaggttttgtttatctggcttgtaggtttaacgttttctataactgtaggtttaacgttttctgtaactgtaggttttctgtagctgtaggtttttctgtaactgtaggtttcacaggctttagtttcccgtagtatccttgcttttttctcctttattttctttgggcttccctagaaataccgccttaagtagagtctgtaccttgcagctattttagttgtaatccactgttgttctattagagccctgttgatgtagtgataaggtgttgcggagaggaaacattctataatcttgtgataaacctcagatttgtttagtaggcctgagtccctgggctgtgaccttcagaagagtttcttagcatttttttttctcctcttctgtgagacagggatgctagaggggactgagttgtataatcaccttcccctaggtcacataaagttctgacaaagtagtttcccttgggagaaggcctttattatatagaacagaaggctccgggcatatttcaaaatacttttccccagatgcattttggcatgcttacttttccccttgcccttgctgagcacatgatttatttattattttatttttatttttatttatttatttttttaacctccagtcttcaccaggagaacatagtgggacttctgggggtaaaacttatgaaagtgtatgggtcccctaagactgagcccccagtagtttttttttttttttttcctcaagctagtttatactcagcctccagcaaatagtgagttaccacttaagtgttcctacagttatttcctctagtagcgctcctcctagtaagctgtgattttgtgtctccagttttcagtgcaactatttgccctgagacctcagttctctggtgtatctaagaattgtccatgttcaagttttccactatttttcatgttgggagagtgggacttccgagctctttacatgttgcaacagaaaccagcagtattatctcttcagttattctttctctcttcttttaggaccccagttatgtgtaacttcatgcacttggggatgtcccagaggtgccagagattcttttcatttttttttcataatttattcttttcctcagaccacataatctcaatgtatctttgaatttgctgggtcttttttctgctcatttttgtcagctgtggactccttacatgaatatttcctttcagttatcatacctttcaattccagagttttaattttgttcctttttgtgatgtctgtctctttcttgacattttttattttgtgagagttaaagaattaaaggaaagtatgagcatgatggtttcctttaaagtttacgtcttaagttcaacatctaggcttcatcagggacagcttctattgactccttttcctgtgtatggtctgtacattcctatatctttgcatgcttcatattttggttaaacactataaattttaaattatttaatgtgtaaactttggaagttcaaatttgttatccccccagagtatcatcctgttgataaggctgctgttacttcgtatagtgacttctctggactaatctcataaagtttattttcttcattgtgtggggacactgaaatctctgttgggtttgattagtggtcagttgatgattggacacaaatcccttttactaagtctcccatccttctgtgaggggctctgtatatgtgttgtgtatggctctttcctcggcttgtatatggcccggtacatgtgtgtggagttccagatacccactgtggacatctcatttcacaggtctcccatttaaatttttggctggactcttggctgcccaactggtatggccgacttaatagctgtggtgttaatcaattgcagctgattgtttttgacaaatgccctagggtagagggcttctcctgcttggtgagctctgcatgacatcaagtaatgataatgccttgtgaatggggcttccctgagagctgtgaagcaggtcagacagtgacagtgctccagagagggcgcttttggggaagtctgaactgggtctgctccctctggtggctacaggactacacattttcacattgttagggaggctgctggttcttagcctactgtgaatggagcttaggagagagggatggagtagaccaagttaaaatgccatgaaccaagcctttctagccaagattcagcagctttcctaagataatgctttagattgttgtacagctttggttaattttcagaattttcaaaaaagttgattttgaaaattgtggcagcattttcattgtttttatgcatgggagcgtttccacagatcttcactccaccattctgagagtgcccccaacttcgaatggatgaatttttataacaagtgaaaaagtaagtccctgaaggttacatacagcctttacccattttatcaacttagaaacaatgaaaagaacgtatgtacttataaatacataaaaatatacacagtatttgtattacacaaaaatagataaacataaaactataaaaagtaaagtacaggattctggatagtggttacctcagatggtggcagaccaaaggatgggagtgggggttacctagaaatatatgtgtcataattaaggtccagttttattttgtagttggtgggttcatggattcttatggcgtaattaaaaatatatacacaggcaaaaacattttatggttgtgtttgccttcatgttaacacatgagatgaggaatctattatgcaacagagctttataaaggagcttcaacctcagttttcaaagccattcttacggccagaggaattgcttatggagcttatctctacccagtctcgtgtaggtctgcctcagctggccgaactccagtgtcaggacaggacagtgatgatgagaagggaagggacagcagccagtgccagttcgagatgagtagtcatctaatactgcctctgcgtgggtccctgctgccatccgcagcctcatagccctcagctccgtaatgtgtcctgatggatttagaagatacatagggagctgtcattgtgagtctgaaaaatatacagatcacgcttcacttactaaaatccatacttgatgatgtcagccacttacacgagcattcaagaggtcttctagaataatcacatgacaagatttgggggaatacacagaattccaatcaagatgagttgagcataatatcatggaggcaggatcagaatggaaaggtaactgataacttggaagtttaaacaattacaattttcctgtttactgtgtgacaagagcattatggggccttgaaaatggcagtgtcaccactgggtaatatattttattcaaagactttttgagagagagcatctgtagagtcaaatggtacttgccaaactattccatgtatggaacccataggacttcataattttatggtttgctgggggaaaataacaagaccactcatggcccaggtgagtcttgaagaggctgtggccacaatatactgagccagccgtagttcactggatgggaagacccaagtttgacttccagatttacttcttacttgcactttgggcagttacattacttctctgagccttattttttttttttattatggagataatgctactgatgtgtaataattttgtatctactagtattagaatgtatgaattaccccttaatttttcaaatacttaaactgttaacatctgaatcttggccaaaatgagcacaaatggcatttgtataaatgcctagttattaaatgttatcactatttaactatctggatttgaagaccagtgcatggcgtttgctaggagtttatatcatgttcttacgtatgtgtgtagctgtctttactgcatctgtcgattaggaggtaagaacacctgctgaatatgtaccttgagctagctattgtgggagatataaaagaagcacaaaactggatcctgtcctcatggaactcaatctggtttctgaggtttagcttttatgtgactcacagatagagcaatgtcacagaaaataatatgcggaaaataaatgcaaaaagaacttgagaaagcttcatgtggctcagtatcctgcactcagtaggatatgtggaggatatatataaaatctaattgagattcttaggaaaggctttaatgaagactggagaatgaatgatatctgttataaaggatggtgaagcttggctattcagagagtaatggaggaggtacttcagtagtttttattgtgtctgcccaagaaattcactcggaagcacaatgtttatttctgaagaggcaaagaccaagttttagaaaataaagttctcctaaatactattataaagtttgagtatttctattatgattttatgacttcccatctgtggtaggtgttttattgaaattatttgaatgttatcaagctgtgacaacaatgctttaaaggtcatacacaaagcacaattaaatttcccaagtgaaataagaatgtgcattgtgaaaggcagagaatttcaagtagttcagttttgttgttgctttttttcatctgggccatttttgaggtgtttaaatcaaaaagttgtttttcttcttgattgcagttttcccttagttatttgtgtagcttaaaaatggaaaccaatgtgtttaagttgcaatatttttgagtctattagttaatataaactttattctacactcaacagtagattgcattatagctatgtggaatgtaaagattattttgcacttatataaatgtgatagcttctgattgatacagatttaattatgcaaactttggcttattatgaattagatgaaacatttctattcctctgtttctttctttctttctttttttgagacagagtttcactctggagtgcagtggtgctatctcggctcactgcaacctctgcctcccgggttcaagtgattctcctgcctcagccttcccagtagctgggattacagctgcatgccaccacacccagctaattttgtatttttagtagaaacagggtttctccgtgttgatcaggctggtcttgaactcctgacctcaggtgatctgcccgccttagcctcccaaagtgttgggattacaggtgtgagtcaccatgcctgacctatacttctgtttcttatgagcttacttattagaagatctctaagattcctgtaatttaaaattttgtaatttcatttcattttacccatttacatcattaaagtgatgaatggttgcttctttcaaatggtgggaaatgaattttggagaattgttagttattattgctcatttaaggttatttgaacgttttgactatttgatggtgttttttgtttgatttgtgatgctgactcataaataccatgaaaaacaggtctttttgttctaaccgaaagagggattatttagcagcttaatgactttggtaaataaaagtttatttgcacctatgagaaagatgacaggtaatatctagatatctgagtaaagagtaaagagagcacaaatacaataagatatggagactcagtatcctatcagctttttgatgtaaaatggtacagtagttactacctaagagaatagtctatttccatgctggttgctcacttgtgtgctcttctgaaagagtgagggcactgtgcgtctgactggatactggggtactctgtttccaagctgcattacagggatttgaaatatcttacatatatatatatatatatatatatatatatatatatatatatataatatatatatttatttatattatatatatatttatttattccatatacaggcataccttggagatattgcaggttagggtccagaccattgcaataaagtgaatcacacaaattttgtggtttcccagtgcatataaaagttgtgtttatgctattttgtagtctgttaagtgagcaatagcattatggctaacaagagtacataccttaattaaacattttctaaaaaatgcctgcacagagacgtgaagtgagctgatgctattggaaaaatggcatcaatagacttgctggacatgggctgccacaaacctccaaaatttgtaattttacaaattaaagccctcaatttgaaaaacataatatctgtgaagcacaagaaagctaagtgcagtaagacaaggtgtgcctatatatgtttctgtgtatatttaaataacttatattaatagctgcaaacagtagatttcttccggtgtatggctttgtcattgttatcactgatttgtaataatttacctcttttttgtatgttttattattttctgccatggttgataaacaagttaatttactctcagaacagagaatctgcagtattattattaatagtgactgttgacttcttttgtcatctaaacaacttgttagtctgcccttaggcttgacattatttttgttgtgaaagaatattcagtaaaaagttttgacatgtttaaaatcattaaatacttccaaactggtttggaaagcttctctgggctgaaagccagttgattcttatcagtctttttgcatgactgaagtcaattacttcagagcttgaacaactgcagccttggtaaatggtccagtactgtccagtagtacaatatgggaggcttttaaatgctactgtaattggtagtttaacagatgtgttttggttggacaagaatgtaaaagctattttggagcattttcaaaggcatgaagtttaaaataatgtaatgttaattttgtgctctgtaatgtatatcgtaagattgaggtcttaatgtttgtattaagtaagtgaaaatattcaaatgaaacttgtgtagaaaaggaactgcctgtgttcagaaagattctgaacaaaaacaagtgaattttcagaactgaactaacagttgccagagggtgtgggttctgacgatgtcctacctgaggcaggctttgtgactttggaaagccttggttttcttatttttaaagaggatctagtccaacactggtctactcagacttcctcatttgtaaaaaaaaaccaaaaaaaaaaacaaaaacaaaaacaaaaaacactttccttaatcttggaatgcttttcacaagaactaagtgtggcatattggtggctgtatgagtactctggtattataggagttgaagtgtgaggtggagagtaagagtaactgggggtaaaacttagacccaatgtgtccagaagattcagagccttatcactgcacaaaggagcacagattttaaacactgaagtgcccaagttgcatgcaaacaggctgtgggctgaccaccggtttttgtatttattctgaatatagtatgccacaaaatttgaatgtatatgcttttacagatctctgtgctctctctagctcccccaaaatctctgcctgtctttagtttcatgctagactgttttatctgtttgttgcctttgaaagcttttgggtttaccccatgctggagtaacatgtagatctagaaggattttgagcaggaggtagtgttatcagatatggttataaggaaagctcactttagcaatagagctgacacagtagtagcaggtagtgaattctgcaagagaattaatggacactagtcatcttgattgtacttagttatttactgcttcagtgtagttctgttgtgcttaattttcttttcttttctttctttcttttttttttttttttttgagagagtcttgctttgtcgcccaggctatagtgcagtggcatgttctcagctcactgcaacctctgcctcccaggttcaagtgattcttctgcatcagcctcctgagtaggtgggattacaggcatacctcactatgcccagctaatttttgtatttttagtggagacagggtttcgccatattgctcaggctggtctcaaactcctgacctcaagtgatccacctgccttggcctcccaaagtgctgggattacaggcgtgagccaccgctcctcgtctgttgtgcttaattttctaaacaaactctagaacaagttaagtggttaatccacgtgatttttgttctcatttaaaatcctatgcattcaaaatgtgaactccattaccatctctctgatccgcccttggcatagaatttggatgtgtatattacactggactcttggctttaaaaaccgtctatctgtatctgtgggaaagcttttcagatagcccagacaatataaatagccctagatttacccttaagtaacaaatgtgtttctttctgtggagttactcgttgtgtctgagggatcctccctgggttatttttttcctctccaatggactggcttggcatatgattgtcaagaacaggcactctggtcggacagaccttgtttaaatcttctctctctctccaactgtgggccagttcgttaatctacttgagctttggttagttattctatagatcgttttgtggattaagtgaaacatcatactgaaaacacttagttttatcatccagaccagggcactaaacgagaataaaccaacctcctagtttttggatgtgtttgacacgaggggatgtttaggggaaaataatatttgaccatcagactttttgaatgctggagaaagcatgcacaatgtccatgtaggaacatacccatatatacaggagacttaaacatgtgcgtgtatacatccatatacacaaaatgaatttaggaagttaattgaatcgaggagtttctattttataagataaatgtgaacagtacatttgtaatgtaagcagtctacttttttactcaaacaagcagaaaatatccttttttagttttaaactctttgtagacaagattgaataaactagagtggatgaggcacagagaattggttgccaatgggatcaagaatgctagaggaaagggcagagattatcctttcacccagaattgctctgtctctcccttactaggtaggaaaacaaacaaataacagagacaagggctactgctctgcactaatgatgcgtggggtgaaagaagtccttgcacactggctcctctttcctgcttcgttcacaacctattcagcactttctggaactttgcgtgaaaaatttcatagatcccagcaggaattttgtaaaacacataatctttgctcatagccattacccaatgttgtgttccttcaggggctgattgaaaacagagctttcacaaggtctcttgcatgatgctagccttcatggcatttgcatcctgccaagtgatacttctggtgaccatcctgccaagtgacacttttggtgacagtgccttggttgactggtctcagcaacctgctttaatctctgcaattaaaaggtatgaatgagtgaaccagtaaaatgaaggaaaaaatcaacatagtggcgggatacttacatccagaaatatgttatctaagggtgtgatactgggcagccagctttcatttaagaaattagacgtatttttaggaaaccagctttctgctagtgacctacattataaaatattataaactcccaagctggatactataaattgaagatgaagttctttcattttgcagttacacaatggaatattatgtgtcaggtactgttctaggcattgggtatacaaggataactaagaatttgtccttctcctcaaggagttcccacttttgtggcagagagggccttgaaaacaaatcatttaactgccacttactgagtgactagcacaggtgaggcatcctaccaggctctggagaaagagggaaatatagccctgctctcagcaaacacaggtggatgagaagggtataagcagggggctgggaagcagagagagagagaacctaaaaagacttaggcaaaggcgagtgtatgataaaatggagaacgccatagttcattctttcatttttttttttgaagtagagtcttgctgtcacccaggctggaatgcagtggtgcggtctcggcttactgccacatctgcctcccaggttcaagcaattcttgtgcctcagtctcctgagtagctgggactacagatatgtgccaccatgcctggccaattttttttttcataattttagtagagatggggtttcactatgttggccaggttgatcttgaactcctgacctcaagtgatatgcctgctgtggcctcccaaagtggctgggattacaggcagaagccatggtgcttggccagttcatcctttaattttggctctaataaattcactgtatgactaaaatgttactttttcttgatgttattattaatcctgtttaaaattagagcattggctttaattatttttaaatttagacactggttattatttctaaaggaagttataaacaaaatttcatacagcatgccatttgacaaattaatgaagaaatatttaatacatgtgagtatctcatttgttttgttattcaaggggattttagcttattgctttttgctttctgtatgttgaactgatattctttttgggcacctgtttgtataaacgtatcaatttgacctgtacttgaattaactgtttattttttatatgttggacagtactacaaattgctctatttatgaactgtatgtttttcttcaatatgcagtttggaatcctgctgttggaaccttatttgcttctgtatgctcacccttattcactaatgtttgataataatgcattataaaatagcagtgctacttctttatcaaaggcttgcagtatttatttagcatttgcagtttcgaaataattaaacaatgctgatgtacagttcttattgcatttcaaaaacctaaccagttaattagcttaagtggttctctcagccctattgacagttggagacacatagtgctggcttgtcaggctgctaaaatgaaacataagaatggcataactgtggttagcttcttttccccctcacccttgagatatgagttggctttcttttgtgtgagataaaaacaaaaccagatcatatgaactgacacttctgcttcagattaacatgagccttgttattcaatttcatgttggtgtttctacactcctttgcctcactgagatttcattaatcctcatatccttaatcgcctcccctttcccttatgatggtctgttttaagattctattatggttttttttttttttttggatgcctttgaggccatctgaacaatactcttggttaacctgagaatggattacaatctgatcacatacttactgctgtgtttgtgtctcgctgcctgtacagtcaggtggctgttctgcctcttcacccttggctgactttcacccatggactttgaagtgttactgcttctattttcatcaaattttatacaaattacaccgtttttccgcaaatgtacatttagtgaagtttgtttggctccagaatccagtccttttgcaggacaggagcagaggaaatggcagtgaaggagagggaagtccacgtaggaagaaatcccaagactggaggtggattggagacagcaacagaagagaagagcgttggggatggctctgagttgaagctaggtgactgttgacccagagaaagaagttgagaggagaaccacgctttgtatttaggtgggctgtggtggggtggaggggattgaggtgtggagtttgatttttgacattcttgtgtttgtgttggtaagacaccttgtggaactctcctagcagagtttaagcgaatgagcgtatatatttgatgaggtgtatatttgagagtgacagcacagaggtgatcataacaggagccactatttgttgagtgcatactagctacagtgataagtgcttcacagacatgctgtctgtgcttcaatgtcctcacctgtaaaagggatttaatagtaggattcttgtgagaatgaaatgaattgatatatataaagtccataacaatgtctggcacataataagtaatacttaagtgttatcataatcacattttaattcagtatccctttggaaagaggtattattgcaggttgaacatccctaatctgaaacattttgagcactgacatgacacctcaaagtggaaaattctacacctgacctcatttgatgggtcacagtcaaaacttcatttcgcgcacaacattattaaaaatatataaagttagcttcaggctgtgtgtaaggtgtttatgaaacaccttatgaattgaatttcatattagacctgtgtcccatcttcaagataccgcattatgtatatgcaaatattcaaaaatctgaaaatatcagaaatcaatcacttctggtttgagacgttttggacaaaggatactcaatttgtgtacacatcttatatgggggaagctgtgactggagcaatgtaactactctgccaaaggttgcataactcataagtggcaggtgaaatgatatctttttttttttttttttttttttttggagaaggagtcttgctctgtcgcctaggctggagtgcagtggcacgatctcagcttactgcaacctccgcctcccaggttcaagcagttctcttgcctcagccttctaagtagctggggttacaggcacacactaccatgcccaactaatttttgtattttcagtagagacaggctttcaccattttggccatgctggtctcgaactcctgacctcaggtgatccgcctgcctcggcctcccacggtgctgggattacatgtttgagctaccacgcccagcccaaaccatattcttaactctgcttgtctctcacctgcctttgtggaaataaacacctcaacagaggcttcatggtgtagaggaaagacaggacaaaatacctaacacacaaggaagctgttttgcttattaaatgaacaatatgcttttaaatcgtgtaagaagagctttgtaatgaaaatcatcattataagaaagaaaaacttacagaaaggtaggagtgaggcttggtatttgagctcctgcggaagaccaagagggagaagggaagatcagtgtagggcaaagcaaatccaagagagccgggaagataagaggaagaatcatgtagtttctgcatttacggacaaaagcgcttccaaaagtacataagggttgatgctatcaagtgctgcatggaggtcattgagagtgagaactaagaaaaggcagttggagtcacattttggtgttaaccagattaaatttccttttggagcaaaaacggttgactacacatacagttataagaatcaggaacatatgatccaataacatagatgaatcaggaactgaaatttggggtgtagatttattcctttgactttctctccctttttcagttcatgttttaccaatagagtattctggtagcagcactgtctgacatttgtcagcttaattagagatcagttacaaacttggctatcttatggatctgtgatacttcccagcaaatctgaaatgcaatacgggcactgacatgaaatgatgaaaaatatgctaattttaacctgaaaaagctccctattaatgcagcaatttctcttattcatactaattctcatttttttttctgcatcctttgtgtctagtctctccacaattgaaaagctgttttgaccaccacttaagagcaatagactataaattctggagtttaatttgtttaatgtctgtgagggcttgatggggttgggactttgttcactaggtatgaacccattgcctagaaatctgaagaagggtatattgcaggttcttacgggtattcctaggaagaagaaatgatttccaaacagaattagcatgtagaggagaaacgcacaaagaaaaggagatttgatttccacaatgtaaggaaatgtaaaatttcattagaagaaagggaaagaggacattgccagcaaagatggagagaaagaaggcgtgtttaaataagctggtttccaatttagctgaaacatttgaaagtaaacagaagtagagctagatttaggggtgtaagatgtgggcaattaatacatttatatggctcaaaatttgaagagttggaaagcatctacagtgaaaagccccttttcctgccccatttcctcagccactcaggctattccccagagtcactgtgcataattacatatataatacaaacatgtatactatttctcttccctcttttatttttccaaaatggtatcaaactgtatatattcttctgcaccttgccttttttctcactcaacatgtttcttggagctgactctcaagcagtttgtgactatgtaattaggacataggcagctcctgctttttttgttaaatggcactgcaaaatgttcctttatgtgtttataccataatttatttaaccagtctcttgttcatggacattataaccttttgctcttacgcagagtgctgcaaagtgagcagtcttttccacgtgtcatttcacacatgtgcaagtaaagctgtaggataaattcctagaatggctggattaaaaggcaggggcagttacgattttgaaagatgtagccaggtggccttctccataggttgcgagtgtatgaaagacttacttccaagccagtctcttctatgctgcctgctataactaccaattaggaatttatttgggctaataagtaacccatgcctggaagatttaaggaatgtgaccttcctaatgcatattatttttaatcactgtgctttcaacctaatgaccagttgagattaagccacgtggtacatatttattgcaaacctactatttggttctagggaatcagcaaggagcaaggtgttacttctctcttggagtttatattctggtaaataaacaagattattccagagagtgataaatactgtgaaaataatacacatgacaatataattgtaacttggcagggggcaggctaattagaaggagtatactggttatggaaggccccctgaggaagtgatatttcagctaaacctggatgatgtaaaggagccagaaatgtggaaatcttgggtggcagtagcaggaacaacaactgcgaagatcttgagccaagagtaggcctagtggttctagaaacaaacagtagggtagaatagcaaagggactatcatgagcagaggggagcagggcatagcctgaagctaaagaggggcaggggtcagaccaagtagatcctcactgtggtaaggagttgcaagatttcaaatatggatgtgatgttgagatttacttgttaaaaagataacttggagccaggtgcagtggctcacatctgtaatcccagcactttgggaggccaaggcaagtggatcacttgaggtcaagagtttgagaccagcctggccaacatagtgaaactccgtctctactaaaggcatgaaaattaggcatggcggtgggcacctgtaatcccagctactgggagggctgagacaggaggatcacttgaacccagggggcggtggttgccttgagctgagatcacaccactgcactccagggcaacagagcgaaacttcatctcaaacaaacaaataaataaataactaggaggctgtgcatggtggctcacacctgcactttgcgaggccatggtgggaggatcacttgaggccaggagtttgagacagccttggcaatgtagcaagatctgccatctctacaaaaaattaaaatatcagccagatgtggcacatgtttgtggtcccagctacttgggaggattgcttgagcccaggagttcaaagttgcagtgagcagtgattgcaccattgcacttaagcctgggtgatggatgagaccctatctctaaaaaataaaaagataacttgggctgctgagtggagaatggattgggagggggcaagggattaagtggagagagtatgttttgggctgggctgtagtggcagcagcagagatagctatgccttggaagacatatttttgcagaggtggaactgttaggatttgtatgccttatgggtgataggcagaaagaggaatcaaggactcctagaattttggcttgagcaagctaggcatagaggcaggaagagacaaggttggggtgcggaggaggaggagaaatttgaagggtcctagggcattttctgagacgagtggcctggagaatgtgacggaatggactgtttggcccagcccacggaggaggagagtgctgggttttagaaatggggcatctgagaaccctgacttctgtcatggtgcctggagtctaaagtggggagcagagcatccagcgaaggtgggtagtgtccgaaaatctggagaatgtttgtttctttggtatgttttagtttttttcttttacatgaatatctatagatcttccttgatcacaaaaaatgaagttggcaaatttatggaactgtgaaagtaataccttatgtttttgtgaaactttgagagataatttgtctactataaaatttatttaaaattgcacaattgtgatttttcacataatcgtaaggttgttcaaccatcaccactatcttgactgcagaacatttttatcaccccagaaagcaaccctgcgctcactagcaattcctcctactcctccattcccccagcccctggcaaccgctaatctacttgctgtattctggacatttttacaaatggagtcatataatgtgtgttttttttggtgtgattctcttctttcacttaaaataacattttaaagatgcatccatgttgtagcatgtgtcagatctccattcttgatggctgaaaaaatatttccgtgcacggatataccacattttattaatttatcagttgatgaacatgttggttgttttgacttttcggctattatgcataacactgctatgaacatttgtgtagcagtttttttgtggacacattttctttcttttggttatacacataggagtgtaattgctgggttttgttaacttgatttttatcttttgaggttgtatccaactttatatcatttatttatcacagtagctatgaaaggaacctgaagtactgaaggatttgatgggctagaggaaaaagtgcatatgttacaaaaaatatttaaaatgaggttcattcatgcattggttaaaatagggcagacctggacacataaatgtgtcaggagaagtaaacaaaacgtgtaatacttatatagtggaagagtgtattgcaggtgtatgtgtgtagagaagtgtgtagagaagttatatctatatgtaatctcaacagaggtagataaaaaacaatgagaggtaggttaaatgagaagtagattaaaaaacaacggtgaaaaatgattaaaaaacaatgatgagtgaataagtgagttgataccatttatgtaagttaagaaaaccacaaagtaatactatgtattgctcatagatggaaatgcccatatacacacacagaagtacaaaaaggattggaaggatacccacaagtccatgatagtagttgctttgtatccctacttctgagctgcaaacccatgccagttttccttaccatatatttatatataaattatatataaatgtatatatatatattcatatacaaatcatttctgttacatgactgtacatttcttcggagtagggactatgttttcttcaccaatttccattgcctagcacttaagtgtgaacacatatttttgaatgactaactgaatgaattaaatgattttgggaacaagatagggcaggactaatgaataagccactctcccccatcctgctcattgtctctgctccctaccttcatattctgttagtgttgtcataatatgaggcttgcaattaccagagcagttccatatgacacgacatgctaataaagcagatggtgtgtgcaaataagcaggataaaagaggtctttgctgcaaaagtcattgctgtctcctttaaagtatgaagtattttatgatttctcagtagattttatcttcattgtcaaggtaatgattatggatcgtataaatctttatggctttgttgtatcaagtgtcaaattacacagcttaggtagttgtagaaagaaagatgtctgtgatcagattaggaagtcatattactaaaagtttttgccgttcagggaggagttggtctcacttttttgtgttcagatagtggagaactgtgctcccgttctagggccctccctcctttctctttattaacttctccccacgggagaaagaatggcaaattggaaagctcggggcttgacattaatatgagtgaagtcactgtatttccacatggctttcgttctttttttttttttttttgcgggggaaacaaggggtggaggcctgcagaaaggtgccagctatcctctactttttgcctgctgtcttcaggcaataaggagattagggaggtgttcccctggcaggcctaatctggtctatacttcttctagtccagcctttgcctggacaggtaaatcagttcaggtttgctctgtgaacctggccaccttcaggtctggaagaagaacataggaagccctgctgacgtcaggcttaagctgtattctccagcacatttaccagaagcctctggggttgtgtgtgaccatgcctcgaataaagcccatgttctgatccccatctgtctgtcagatgttatttgtggatgttatttgtggttatgcccagttggttagaacctagaaagtgataaaagtgagccatgcagccgggcacggtggctcatgcctgtaatcccagcactttgggaggatgaggtggatggatcacctgaggtcaggagttcaagaccagtctggccaacatggtgaaacactgtctctactaaaaaatacaaaaattagctgggcatgatggcatgcgactgtaatcctagctaccgggaaggctgaggcaggagaatcccctgaacccaggaggtggaggttgcagggagccgagactgcgccactgcactcaagcctgggcaacaagagctaaactctgtataaaaacaaaaaataacaaaaaaactagcgagccctacagctgcaggctgaggttctagttttggcaataagctaaagtgtaaataattttacatttaaaactatggaacaaatagaggtgggacatgggctgcccctgcccacctctccagccagttccccgactcttcgtcttctttctgctgcatgtggtctgaccatcttagttctcaagtttgccaaactttttttcagccatgtgtcctttgcctatgctgttttctctgctaactttctcttttttttctctctcttacttgctgcttttatggtcaagttctaactcttcaagcgtacacttaaatagtaccttctctgaccccgtaggctaggttgattgcttcagtgtactaaggcaaaaataccctgagtatctgtgctcattaacctctgtgtttcccttttgtaagatttatcacaattgtaatcaaatatttatgctatgatatatttgttgcctttctagattttctaacagtcttctttgcattgttacataaagtgtttagtgcagagctgggcactcatatttggtgcctgagggagatttgttgagtgaataaaatagcagtgtccagcagcgacatagactgctgagatatggcatgtcagagtctgaaaggcttctgtccagttggcaagtggaattcattggatgttttacaaagaatagttttagtaaggtggtggggacggaagtgagtttgcaaagtatcttataaaaagctagacttaattactcatttacgcaacattggaacccttacaagtgatttctctactgagagcaacttttcttgagttttactaactcagtagacactgtcagaatctgccagattacaacaaaggggtaaaaattcctgatcacttgaggtcaggaattcaagaccagcctgggcaacaaggtgaaacccgatctctactaaaaatgaaaaaaaaaaaaaaaaaaaaaaatagctgagctgggtggtgcgtgcctgtaatcccagctacatgggaggctgaggcaggagaattgcttgagcccgggaggcggaggttgcagtgagccgagattgcgccattgcactccagcctgggcgacagagcgagactccatctcagaaacaaacaactcccaaggcattatactatgactcttttctcaatgggtagtgaacagaatggaatattcacttcactgcaaagagtcactggcaggtggtgcagagcactgtgctccagaaagagcaaagagcctagaggtttctgatctctgcttatcactcagccaaaagtacagtcatttgcttaaaaaaagacaggtggcataaaaaaaaaagtattctttaatctctctgctctacaggacttgaaacatagccttaaatgactaagtcttcacgtgagcatgacataacctggaaatcttcctataatggaactggccttgtgaaggtatttattgttaagactttccagggtatattttgggaggtgccatgggcagatacatcggcgatactgttacatagtccaggatgttctacttttgaaaattaacaataattacactcaagaccttaggcaagttgactattctcagcactttatatatacagtcgtccctcattgtacaccgggatctcccctacccctcgcctatggtcaaatctgcacgtactcagtcttacagtcagccctgaagaactcgtatatgtaaaaagagggtatctctaggcagtgaggtagctttctgttagctcttgtagggaccatgttcttgtggacttgacaaagaatgttatatcaaaagtcgtaactcctttttcctgatttaaagatgacatttacatggtttttgtgtcccatgaatacggtatttttgatctgcatttgattgaaatgcatttgagctgctcagttgaaacctgtgttgttcaagggtcagactgtattaacctatttaatctttgcagcaaatcctgtaaggaatcagtccttttacagaggaggaacctgaagctcacagagcttaaggactttgcccgaagtggcagaattggcatttgaacctaggcatcctggcttcagaatccatgttcttcccttttaggttatactgcgtctctgtggccacttgatgataaagtcagtaattaggatccactgttgttccctcttgtgcctctgcccttttgctcatgttctcctccctgacactagagcacctgctcccccttcacctgcagtgagtgtctcggggaaacatcagcacagaggctctgctttctcccacccggcaggtccgcagggggttgctgtttcgaaagtattgagtgctctggacaccatgatctgttctgtaggattcttctgtagcaggagctttgtcatggactcagttgccttttgaatgctggtcaggtatcctagtcatctttcacaatgtcgatcatatgggaaaatatgtttctagttctgacaactgaattacatgtacacctttggaacataatctgtttttaggttgagaactacctgtgtattcatcaagtactgaagttcccagtgttcaagaaatgccctatgctattaacagagaattaacaggtttctctaaagaacaaaactaagcttagtatggcctggtattaatccctgtctagaagtttcacaatcaaaagggcaaaatgtggaaaagcaaagataaataagtaaaattggaaaatacgcaaagccgttagagatgtaccagtggctcagaagtaggtaataatgagaaatgcacccaacctctgtgactgtgaaacatgccacccaagctttgggtttttgaaatctgtctctggcacttgaatctccttgtcagtggcaaactggagagctttccatacttctgtgcaaaggaaagcataccccagagcaaaaacaaaataaaatgctacttaatattcaatgtggtgtcctttgaatttaaaagttgtagtgatactattatagcagaattaacattattgtcatattagcattggaactttcccatttatttttggcttggtgaatttgaaagtgttgtttaacagaaaagattttaaaaggttagatgcaatagcatttattttgcacagtttgatggattgccagcagcagggaaaactacaactcagatcgtttcaacaactttctgttcttggatttttcctttctcaccaatttttctttcagagcaataatcattttactgtatatgaaagagatacctaaatatcaggtatctagttaggtgctaatgaactcctcctgcccattttttaattgtttgctttatcatagctctaagtagtcgtgctaatcttttagggggagggttaaggaaagattttacttaattttgggatttactttgtcttttacagagcttgatatgtggcttaacagtaagtaggattatagcaagttgttattttagagaaagtaaacgttatctcattatattcttttttaacataatgagaatctttatggaagaatttgcgacagctcaagaacattttttaaaatttaattttaagttccaggatacatgggcagggtgtgcagagtcgttacatagataaacatgtaccatggtggtttgctgcaccgattaacccatcaccaagtattaaaccccacatgcattagctatttatcctgatgctctctgtccttccacacctccctgataggccccagtgtgtgttgttcccctccctgtgtccatgtaagaacagttctttttaaaggttagtacttggattgttttattgttgtactgtttaagcagctttgttgagaaagagtaaattaaagcttttatcaatttttttttttttaacagcaaatctgtactctccttttttttttttttggtggcccaggctggagtgcagtggcgtgatcttgtctcactgcaacatttgcctcctgggttcaagtgattctcctgcctgagcctcctgagtagctgggactgcaagtgtgtgccaccacgcccagctaatttttgtaattttaatagagacagggtttcaccatgttggccaagctggtcttgaattcctgatctccagtgacccgcctgccctcctcggcctcccaaagtgctgggattacaggtgcaagccaccgagcctggcctgcactctcacttctagttatcaatgttaaatttatcatttgtcactaaataattatgatattcataattaccaaagccttttaaaactgcatttttataatttttgctacttgctgatagaagaccttttgacttaaatatctaagttttagattgacattagttttgatatataaggtttagttttcagtattgagctgctatctgtaaactaattatattttgaagtgaaattagtggagaatggacattttctacattgcgtgagcgtctacagctagagagtatctctaggcagtgaggtagctttctgttggctcttagatgggatcacattctttgggcttgacagtggatgttatgtcaaaagtcataactcctctgatttagagatgacatttagagtactgtaggtttatgagaacctgctcttaaccttaaataacagagctgctgccagggctgctgccttccttcctggtttttgggtgcttgagactcttggaaagtgggccagatgcagtggctcctatctgtaatcccagcacttctggaggcttaggcgggcatatagcttcagtccaggagttgtgagattcttggaaatgtaaagcatagttgatgagagggggaattaaatagcagaccggatggttctcaaaataaaataggaaattagaagatatgaggccttaataacaacaacagcaaaaatgagatgtatctatctataatgagatttctgaatgtcataatacagagacaattctgtatccaattagaataaaacttgttaccttcaagtggaatgaatcaaatgcaataattctatacccagccaaactactcttacataggtggtcagaggatcaatatttaaaaacctgctattattctaactttgaatcctttcaggaaaaaaaaaatttagaaaatacttaaggcattggtgaagtcaagagtgaaaacctcataggaaagaatatgtggcttatatgcaaccgattaacttgagtcaaatctaaataaatgttagtaggttgtgaagctaagtggattcattgacatgaaaaatactatagaatataaccaacttttcttaatactggaagtccttttgaaaaatcaaattattgctgggtgtggtggctcatgcctgtaaccctagtaacttgggaggctgagggaggaggattgcttgagctcagaagttcgagaccagcctgggcaacatagcaagaccccatcacacacacccagaaaacatcaaattatttctttctgtagctctgagtttatatgcatatctaatgaaatgattgaaaaccctactctggcaacacaggagttgggctggcgataaaaggtgggggaaaagcaggagtacttaggatgtgggagaggaaatgatacaaatatgatagactgttaattcctgggaaaaataccagaaacagctgatctgattttcagaagtaatcataaaaatagatagcatttattgaatgttgcaaggcctttgctaagtacttaatattgttacctcattttaccctgtatatcagagatattaatgagctggctaatttatatacctgtagaatgtgtaatgaacactcattagcattatagatatgttagttttaaagtgtatctgtgtccttttaaaatatttccttttaactcttaaattgaaaagtctagggaataatcctaatcaagaaggagttgcaggaaactattgtaaatccaggttgtaaagagaaaataaattggttggtgagaactgtcaccttttccataagataatttaagcacaaatgattacaacaatttacgttttttattgtggccaatatagttgacttggtttaaatcagacaggagaaaagaggaaaatttttattgattaaccaggccctgaattttctgtcttaggaggaggaaattatgtagttaaattgtatgattcctgtcaaaagaacaatgaacttttgagcagattggctgagcagagagaatacaaagcagggctaatgattgtcttcatcaaagagaacttcttgggataagcagatttctatgcttttataagatagatttttttgggggcagtgagaatataaaaacaaattcgggaatgagaggttaatcgataaagaacctgagttgtgttttagtcatggaaacagtggcttttttttttttcagttttgtttttgataaaaagtatcctaaatataaaggaggtatatttccaggtaggactgtgctatgtaactcagtagtctctaaactgattttagttttgcttttgatatctgaatggattaggaaaattccttccaagaaaccagagaccagaagatcagacaaataccatatcagtttctctgctttgaaaattataattcaaccttgtaaaatttttctaacgttgtgttctctgtaaataacacagagtaaaaataagtcaaaccatttgttttttcctctaaatgttctgaacattaaacaaatggttcttggcaaacacatactattttttttttttttttgagatgagtctctattgcccaggctggagtgcagtggtacaatcttgactcactgcaacctccgccttccaggttcaagcgatcctcctacctcaaactcccaaatagttcggactacaggtgcgcgccaccatgcctagctaatttttgtatttttagtagagatggggtttcaccatgtttgccaggctggtctcaaactcgtgacctcaggtgatctgcctgccttggcctgcctaagtgctgggattataggcgtgagccaccatgcccggccatactaatttaattttaggaatgttgtattatagttcattttgaacaaattgtaagaagattattttgtgcccatatgtgtgataatcagaatagcttgatgtagatatttggtatctttttagaataattatgtttagataaatcttttctgtggaaacatattcctaaacatttaagcctagttataccaccctcaaatataagaagtttatgaactttgtgggctgattcaggaaatcttttcacactgataaaaacaggagactttaatattattttgggaagaaaaatgagaaatttgaagatatgtctcttatgaatcttgctgcatcagtttgttttctgctgatagtctggttgatgcacaatttagttttcaaagaatttctcttcaaaaataccggctaggcacagtgttcacaccggtaatcccagcactttgggaggcagaggtaggaggatcgcttgaggccgggagttcgagaccagcctgaacaatgtaaggagactctatctctacaaaaaataaaaaaactagccaggcatggtggcgtgcacctgtagtcctagctgcttgggagactgaggcatgaggatcccttgagcccaggaagtcaaggctgcagtgagctatgatagcactactgcactccagccttggtgacagagcaagaccctgtctcaaaaaacaaatatttttcatccttggaaaaataaaacctaaaataagaagagcagcacaatatttttcttttttttgaagtagcagggctgaccaaagccatttctagccaaataaattatttattaatcaatatcgttaccacattctctatgtggaaaaagtattcaaatcttgaggcctatgttttttcaaacttgagagtcatacagttgccagcttttttttttttttttaagtagtagacaaattgtaagaactacaaaactgaaaattaccttctgtttttcttccccataagctgctgttgaagtgaagtgagctcagggagacaggcctgttgttatcttcctatggcactgatttacacttttacagaagggaaatttatggcccttatctgttgaggacttttatgaatgactggtataaatcaagaattgaatgaatatttttccctttaagcataaatctgtgattgggagattgatttctgagtaactctttggtaacccatttaaattgtcatcttccaattttctgtattttggcataaactgaataactaaaatataacttaataccagcatgatagatttgtttttcttctgttagatactttagaattcatctagacttctcacagacctcgataaataactcagcagtcagaatggaaaacaaatttatatagtggaaatctcattaatgggaatgaacaatacaactgtattcaaggtttaggcaggagaaggaaaatgatagaaatgtatttgtttaattttaaagattcttatgataaaatgatcattaattagggaagataagtagaaaaagacagtcctttctgggacatttgaagactaacagccttttattgaaagtcctggaaaagtatgtgtaaaaagccagccatgatgatcttttacctacacttccttaggagactttccctcagcaagatgtgtctttctaaaaacaaaagataagagacaataggagcccacataggatggaaagctagaaatcaggtgggttaaaaataatttcatctacactatcttccccttctcaaaagatttttaatctgtaaatggcaacttatacatggaaggattataaaatacataaaattactttttatttgtcttctcagatatatggcgtgttctttatcttccccttgttccaagtaattttgttaagcagtaaacaacgtggaagacaggttggtcaggagataagcagttgattccgtgttttttgaagagaacttttatgatagtaggaagaggagggcagtgctggtcctgtagtgcagtcgtgtagtactgtttgctgtgggacaagaggaaggaacagactggcaggaagggactgcagcatggaagggtgctaagtgcgtcactgagtgataagggtgctaagtgcaggaaggcccactggatgggcagggtgagagtgggttcaggttgtaggtgtggagttggacaggctggccttgttctagcagcaccatttactagctgtgccaccctaggcaagtcaccttctctgctcctcatttcccttctctctaaatggtgataataagagaagctaccctctgaagttgttaggattaactgagctgatacatagatgtaaaacccataggacagtacctagcacgttgcatccaacaagtgtcagcaaaatattagcctagccagtcacctgtggccattatcaacatctgtctccagttagtcaccacctttggtcaattctgcatttgaatatttcttaaagatgatttatcttctctgccctcatggccatagccttagtgtacagactttttaactctcaaataaattaattccgtttattcttttagtcaaattttactaaaatccattgtgcagaaaatgacctgttaattttctaaaatgcagatcttgccctgccactctgcttaaatccctgtcatggttttctgtcatccttaaggaatttataattaactttcagcattaaaggcatgcagagttcttcaaaagttagctcttgcttgccttccaacctcatctctcatcagatactttatgaacatcatatattctaattcttactatacctttccaaaaggcagtcctcattttgcacagtgatgcaggactgtaacagtgatggttcaagctgaactacacacaacaatcttaataacagtgggagcaactccagtattcccatgacctttgaatgtttttgttaaaacattaaaaattctctgtcagtgataaatatgtatggaaatgaaaaagtaaaactggtattgatgtagtatactgtaatgtaaaacattagatgaaaggctcacacctgtaatcccacactttgggaggccgagacagacggattgcctgaggtcaggagttcgagaccagcctggccaacatgatgaaaccctgtctgtactaaaaatgcaaaaattggctgggtgtggtggcgggcacctgtaaatccagctacttgggaggctggagcaggagaatcacttgaacctgggagagggaggttgcagtgagctgagattgtgccattggactgcagcctgggtgagaagagcgaagctccatctcccaaaaaaaaaaaaaaaaaaatcagaagaattgagaattaaaaacttatcaggagtagtttgaacagtgcttgtcttcttcatcttgtcatacgatataagatgggcctagcatcttttctatgacttggtgaatttccatactcctttctaagtttggatcagtttcccgtatttcatcctttgtgctttcagtgagtttcattaatgtgaagtttttttgctggcatcacttcctctgggacgtctttattcttttgctaatttatgtgaagctgccttcaccaagctcctgtggctgcacatcattgtctcttagatgtcgttagtgtctcttagatgtcgttagtgtctcttagatgtcgttagtgtctcttagatgtcgttagtgtctcttagatgtcattcccatagtcagctatttcttctctaaacgtcgtttatgtttgattcagatttcactttgagtttaccagtgtttcagtgctgtactttcatctttgctgcccaattccctctttggattacccatttttgtaaaatgtcaagtgggttaatcactgtgagacatggtggcagcacaactatatgcttttctgtctgtgtaccaactcagatgcacagtgaccaatcactgacaggctttgaaagaagtgacgtgattggtcatggatcatgatacagatctgttatttactcagtgattggtgcactgaatagctagtggtgaagtttcttttatgtaattattattgattaatttatcatagtaactgacatttgagtcttattattggcagaatgatgttaattaaactgtggtaactgaaatttatgcatctcagaactgtgcaaagcaaggactgcgagtatgttataaccatttcacaaagtcttaaaggttaaatggctacatacagcacatggccaaaaagtggcagaattacattaacataacttttcaaatatctttgatatttatgttataaggaggcacaatctgtctcttaatgcttctgtcaaattaaatactcatggagttcaaatacaaatggattgtcttcagaaaaaaattattagcatgtgtatttaggtccatagccctataggaactctgtctgtgcttagcttgggctaaccatgtaagactgccaagatttgcataaaaatccaattattgtaaagagctactcaaagctagcaacatacctgaccttatctgaggttattttttggaatgaatcaagagtccccagccttggagtgatgaaaagaccatcatttttatttgttttattctggaacaaataaaaaatccctggaaaggaaaggaacatcccgtagtcaagtggagaaaactggtctaaatagttagcagtggagatattgagatactctgcttaggatgagagatcagcagcagtgggtagggatgttaatgactggaccttaagcttcagggattcagaaataagttcagttagttctcttaggaataagttaaatagtgtctgctcaattcatctggccggctggtagtcagagtccacagtaagtagtcaaatttgaaagttgtaagatacaatccagcttctgcaataatgagaaggctcagtttggagcatctaaaattgttcagggtacaagagaactgagatacacagatggactaaaataatactcagttgtggatagatgaaggctgagaaaaaatatgataaaaggctttttttaagtgcctctaaaatgccaggtcttctagattacttttacttatttgtaatgtaattcttataaacatcttgttagcaggtgttatagttgttatttagaacttttctgagattatagagctagtaagtaatagagttgggttttttgttgtttttaatccaggcccttttaaatatataactcctaaatgaaagataccagacccaaacattatgaaaagaaggatatttggggagtgcatctctcatttttgatcttgcatgttgtgttgtatggaccttggaatgtaattttctgtagaaatatttgaaaatgtaatttgatacccagtccacactgcaaaagcctatttttttttttttttgtcagggtcttgctctatcacccaggctgtagtgcagtggcacaatctcagtttactgcagcttcagcctcctgggctcaagcaatcctcccgcctcagcctcctgagtagctgggattacaggtgtgggacaccatgtctggctttttttttttttgtagagacaggtctcactatgttgcccaggctggtgttaagccctgggttcaagcagtcctcctgctttggcctcccaatgagttgggattacaggcatgagccaccatgacagatatagagacacatatggagacacatagagatgtgcatgtaaaataggcccaaaagcctatccgtatgtgtctctctatctgtatatacatttctttctgtgctatttaaaatacatgcagtcactgtgtgacatattacatttcaagtgccaacttgggaatggtggaactctgcctctcaccttgaggacagcccttctttgcagcacagtcaatgactaggaggacagtaggcctgtgtttacatctgtgcaagaatggcatctgccttcatctccgcatgctcctagagaaggagccgtttcagcgagtcacttctcaggtattctaaatttggtaataaaaggacttgatgcactccaggtgcagtttctctgaccatatcaatgttcttaatttttttttgaggggaggggactgtgtcctaattagtaattaaggttattttgatagcaagtgttagaaaaatgctaattccaagactacaagcgtatttcacattctgaaatccaggtatcctaagggaccatggactggaactccactagatactactcagaagcttcgtccgcctcatctgtctctacttttacctctgtgacctagaggtcacttgaaacaagcttcctcctgctcgtcagcttcattcctctctttctgatgactgtctttctctagccatctgagcctcctgtcctatgtgacagtctcagctcatgactttccatcccctcagtttcaagagtgtgtctgagacctgattccagaatcccaaaaggcagaatgacattgactgacccaactggagttcgttaggtatccgtggcttgttaggaatctatctctagtaggaatgtctgctgccctgggggccgaatcctgcctgtgcatgacctgctagggcccatgcctccggtggatggaatgaagcaaggatgggggctgcctgcagagctgtgtcactcacttgtattcagctttcctgcctctggctctctgtcttttacctttttttgttcgtttgtgttttgagatggaatctcgctctgttgctcaggatggagtgcagtggctagatcttggcttactgcaacctccgcctctcgggttcaagtgattcttctgcctcagcctcctgaatagctgagactacaggcacatgctgccacgcctggctaatttttttatttttcatagagacagggtttcaccatgttggccaggttggtctcaaactcctgagctcaagtgatccgcttgcctcagcgtcccaaagtgctgggattacaggcgtgaggcaccacgcctggccttttatcacttttaaactaagaaaacaatgatcaccatacatgctctgcttccaaactatactttcacatccaaagtacccccagatcataaagtgccaccaaagagctgtgatatgaagaaagaccccgggtagaatcactctgaaaatgtgggaggtttttttttttttttttttttttaaagcaaattcattttacttagccagaatcctaatagcctgctgatttttgtagatgattactctgaaaacatatgcattggtgtggtctatgagtaaggctctgccttttaagtcacattctttgctgcttcattgcaatgaaaaataccaaaggtgaataccaaatcaattttttttagtattgtacttgtaaagacagtccatgaagtggtgagtgggagaatcaaacttttgtggtaatcttttattgtaatctactttcagctcagagaagcagcatagcctggtggactaagggaggatggggagtttggagctctgagatatgaactgttttgcaatgactagttttgtgaccttgagaaaggaccttaacctctgtctatgtcttcatatgtaaaatgggatctacctgatagaaacataggtgcattcatatgtgagcaaactgaataattagatctcacataaatcaggagtgattttttttttaaatggctgaagcctgcggtttataaaaagattctccctagaattcctttaagacctaaccttttctcaggggtgtttaaactgtgattaacaaatgttaaattatacatcccagtttacaaaatatacccgttgaatagagtgagactaacatgactttttgtctcataaaattatgacaataactcagtcagtctgtgtgaaatactttgtaaacagagctttgcaggctgcagtaaaaaaaaaaaaatatatatatgtattttatatttaaaaaatatatatttttatatatatatatatccccatacctgaagattttggggtgaactttttccaggttaagaatgacattagtgccaactgtgctgtattttggctatcgtgatgacattagtatcatcaaattggtcgtggcattgggacactggcagcatgtcatcctgccccagtcaagaatgactgtaggcagtttcagtttatctgttgctactagaattttgatgtagcagtgtcaaaaggttgatttgtactatggcaatcttattcctagatgtgaattctccagggggcaaaatatcctaaaagctaacatgtaaacaagctcaaaggattaatgtagtaggaagaaatagtagtttgttatatattcatgttgaatttaggtaactattttagttatttaaaagattactaccgaagggaagaaacatattttgctaggtttcgcatagaaaaacctgtgtctggctcaaggtaatacttgaattttaataggaacctaggtttgctgtcttcccagtgtagactgtagcctgcactgtcatagaagagtgttgattgatccggttgtgaaatagatggatacccacatttaagttgcttttgaaagagtcagtttccctccacaaatatggcaacaaaattcttttataatccacaaatagaatttttcttcatctgaaagagatttctcctaaaccagcctgaaaaattgcttttctaggaagaatttcatggctgagcctcattcttgtacagattcatagcatgttattactaacttgtaaatattcacttacagaagagagtgactagaatctttgaattcttttatattggtgttgaggtttctatccaagttacgcagtttttcattcattttagaggaagattttctcaaacaaggattcttcgtggttgcaaaacctatccccagagattccagtcaacataattcaagttgaccagtggattctaagtgtgacagtacggtgtttagcaagtccaagtgaaaccagatggaggtcagagaatatgcctggcttcgtccacattatctagttatctgcctcaaccctctagtttcaaccagcttcaagtgaatgttaaaccagactgctgtaatctacacatgctttcacacttcaaaaggtgtgtgttagttgatatttggtttagtcatttcgtctcttgagaggaggggttgaagtttttatttccagtagtattttattttattttattggatgaagttgtttttatttcttttctccagaagaggtaaggaaggttcctggattattgtatttggttggtaaactctcctctttttctctttctgtgtctgcatctcctcctttttctctttccctatttcttcttcctcttccttaggtttatatgaaatagaaacaattttctagcacaatgactaagtgaattgctacattaaagactggctggccaagaaatggttaatctttgtatggcaggctttagggaccaacatcaaatacaaacatgttggaaatctttttgtcattccagctcaattgattcagaaaaattttaagagcaatagtcagtgcttggaggaaaaaagaatactattgtaaatttgagacgttctcatcttgaacatggctcttgtaaatcacaagcttgacaaccttacagagtacatacaagccgtggttgacttcagaaatatgtgttttagacacagttttacatgaaagtcatgatattgtaaatataatgatttattaataagtttaacttttgttaggatactttgcgcataactaccgcaatgcattaagaaggaagtgttaagaattttcatcccacagatctgatgatttaaagtagtgttccatttgtgcagtcaatagaaggaggtgcaacaatgaaacagaaacaaggcaaaatctatccatatgggctcatcttatgacctgttcttgctggtaattttggcgtattttgtgatgatttttttttcctctctttttgaaggctcagtagctgtactactcactctaccaggccaaagagtcagcgtgatggagagaagattaggaaatcatgttttaaaattcttctaatgcagatgaatatgtcaacatgatttttctttcatcaggagcctgtaagagaatttccaccttgttcgccttggttttggtatatgaggtggactttttacttaggtgtcctccctgttgttttgaggctatgtgccctacgccactgtggtttaccctgaggaagtttgcgtagctcgcgtgccaaccacttctcttggagaagacggagtgtcataactacagctaacatttattaaggatcttgcatgtttttcattttaatcctcacagctccttaagtattatctccattttgtagatgggacatctctggctcaggctcaaagatgttaagtagctcacctaaggtcattttgccagctaagtaaccaagctggggtttcagcccaagccaactttaccgagtgtggatggttttaaccagttctctcgatttgcctccctgtgaggtgtgagttgttgccatcattaacccaggcctatctgcttttggggttcagagttggaaccatctgcagggagtgtagatagaatcatggggggggacagagcacaccctagtggagcctgccaagactcctcattgagcccagaaaactgagatacaggttagaattggccatttcatcgcagtgtttatttcatgttttctcatctcacaggtgagttttctagaggaaagatgatgaagtaaaattttacaacaatttttgaatacttttcctaactgtcaaatctccgtctggatcccattaataagatacaaagttatatcccaaaagtaccaaattatgtaattctttttctgattagttcattgcaacttgttcagcttcaaataaattaaagatttcttagttattgtgattcttaataattttgcaaaagtctctgtatttttttttttgaaatctttttctcattatttatggaagatagtgattgggagaaagcaaaatattaggcattaaaacagattatactggagagatctattccagtgtgatcaccaaatccacctattttgatacttgacttatgaaggggactgcctttttttttttttttttttttttttttgagacggagtcttgctttgttgcccaggctggagtgcagtgacttgatctcagctcactgcaacctctgcctcccgggttcaagcaattatcctgcctcaggctcctgagtagctgggactacaggcacagacagtcacgcccagctaattattatgattatgattatgattattattattattattttgtattttagtagagacggggtttcaccgtgttgtccaggctggtttcgaactcctgagctcaggcaatccgcccgcttcggcctcccaaagtgctgggattacaggagtgagccactgcactctgtgggggcttttaaagaggaagtgaagggtaactcatctctatcctactttacatgccccacctaagtccaactcccactgcctgtcttctaagggacatcttgtggcttgttctctgctctgctcgtattcagtctctacgtccctcatgctttctcatggatttacaatgattacttactctcaaacttatatttccagccctaacctctccagtgatcatttgttaacaagattgtgttaaaggaagcaacaaaggttcttctattggatgtagttgaaaaagcagaactgttgctctggcctaaacattaactttggagaggtttaaattctgtttagaagttataaatgagcttaatatcatgtgatttgcatgataagttattttaaagagtttaaatccatgattgttcaaaataggttgttttattttcaatataatatggttcttaattgtaacattaatgaacactgaagacatttttaagattcatttatgtaaagtgatttgatgaagtaagctgacatttgatggacttagtggaagtttagacccaatttgcatttcagtggtattttatggctgactttagaaaactttttagataggatttctcggtaaattaaaggatttagagggatgattacgaaataattgattaaaaagtgtgcaatattggttttcattgaacttaagcttgtatgggttcaatttaaaacctaattcaatacattttagattttatatttccctgaacctcttctgctgtattaattttgtcatgcttgtcattctaatctaatgatgatttaatgtttgcaaacctgaataaatctgtatgcaaggagttttgctgtgtttttaatcaatgaagattgaaatttggcaactgaggtgataaaaaatgaaaaattttaaatagaaaatgaaaataatgattatactttagaaagtactcttattaatgttcttggctatgaaccatgtaatatttttctcttatttttatcgtgtaatattttgaaggtgactgaaccttaaaagaagtaattgccactaaatcgtgaagaatgtttaaattagaacagattctttgtcctcactgtcttcccctttccctgaaatctgtagtctagagttgtgaataagagccagaagaatgttaaactgccttttaaaaactcgtctaccctccccaagaacctacatagacaatagaatgttctgtaatgaaagtgtatctttacctcattatttatttattttattgagcaaaaaatgtagaacatagaatgtctaacggattagtcacaataaaaaaaatttcctgggttatatatgtaaggggcagcggctgctcctctatcagtccaggagagcctggtctgatttcacattgcttttctttccacatgatctcatgacactaaaagacgattaatacatcctttaaaaatcaatacgggacattttactgtagtccttcacctttattgttcagtacccttcaggggtgaaaggagatattccaatgcaaaaaatatgtctgaaaacctgagtggtaagtaataaaagtttttttttctcttaaaaagtcttataacattgttatttcccagatttgaggggtgggccttggggtggaattaaaaaatcagtgtaatcatttgtaaggacaaaatgcgagtttctataaagaatgttttagcataatgtcactaatgttttgcagtgtgtagagagcaaactttaaaaaaagatgtgaaaatttacaaaccagtaatcctctatttcatgtgccagcagtcaaaattacgtgtgatcggctgggtgcagtggctcacacttgtaatctcagagctttgggaagctgaggtgggaagattgcttgaggtcaggagtttgagatcagcctgggcaacagcaagaccccttctctacaaaaaataaagttagctggatgtgatggtgcgcgcctgtagtcccacctatttcagggggcagggctaggagtttcaggtttcagtgagctgtgatcgtgccactgcactccagcctgggtgacagagtcggatcctgtctctgccaaaaaattaataatactaaaaaaattagatatgattaaggataccaaaaaattattcagataccttagtggaagctttggctgaatagaagttccatcttttgtagtactgaaaccaagtgaagggattacgtagttgacatctctgaaagagagaacgcagtggtaatgagaatactccccctacgtttgtgtatgagccttggcagtttcttttacactctctcatttaatcctctaagacctgagacattgttggggcaagtggaattattctgcattttatagatgaagaaatggacttggaataattaagttatttacagctaacccgcaccccagatctcttgacctagccccctgcatcctgcctttgccccagagtgcttttaatgttctgcattgcatggtctttttgttcattttattttatgtatcatagttaatactaaactgaacgtttgctgctaagacctatattattttatattcccaatgaatatgacttctgcataaaaacatttaactagggtaatcattttatagtatgtgcctgttgtctctgctatatctatcaccttcatgtgaagacagagaaaatagaatatgctgtgtattcgaaataatttcttctttacaatgatgtattctagattctaacatttacatatgagagaagcttcataaatgttacgttttctgtggccgctatttctgtcttatctgtgctgtctacacagtgaggacagctgcagagacactgccagtctcatgaagtgtccattgtgaaggcccatgtgtcagtgctgctgatggcatgcaggagttggtcagtaggatggttaagaacatgggctctggagtggacggtgtctggcttcaatctggggctgtcacttagttggtgtgggacctctcatctctattgccaacccaagtttttgattctttctttcctcagtaaactcttaatctttctgtccttggaatcttctcctttcacttcaaacaactcatctgtctttatcctgaaaagtttatactttactaagttccatcattggcagcaaccctgttttcttcccctttgtattaatattttttttttttttttttttgagatggagtttcactcttgttgcccaggctggagtgcagtggtgcgatcttggctcactgcaacctctgcctcctgggttgaagtgattctcctgcctcagcctcccgagtagttgggattactgttgcctgctaccacgcccagctcacttttgtatttttagtagagatggggttttaccacgttggccaggctggtctcaaactcctgacctctcgtgatcagcctgcctcagcctcccaaagtgctgggattacaggtgtgaatcaccatgcccggcccccctttctattaattatccaacatctcaaatgtgcagttcatcacatttttggggtggtggttagacacaatatagttaacctatttagataaataaactcttttatttcccctgagtgaacatttcatctaaaacgtgtgtcgctttcttgcttaaaaaccaataaagctaatgtttctcaagtcatcatatatgagtagcatgcaagctccggatgcagctgttcctctagagactactgttgcgctccttacaagcctctagagcactagtgaagagtaatgttagattgtttcgggtttggtcaacctttcctaagactcagtggacagcaatcagttaatgtgccaagaagcataagctaaatccagattgcaacatactactcattctgaatctgtaagggaatgcctctgtgagtcactgttgtgggaatgtcctgggatggcatagttaatactttctaatgggatttaaaaagtcagtacatttctctttttgaatttgtttcttaatgatctgatgcacttttggataagatacagcttgctttatagaacagaaaaaacattgtcatttatacatgatttagctttatgatcatgatttaaagccaccagctttgtgggaggaagatagtgagaatggccatgacagctttaactacacccttgaagacctccttgcttactagagggcactgtgctgtcctcagatgccctgaggcaggtcagattgggataataattacattaactcccaaactaccctgtgctggactttttttttaagttatagctctatggagatataattgaaatatagtaaatgggaaatatttaagatatataatttgatatgctttgacatattcacagtagtcccctctcacctgcatattcatttttttgtagtttcagtcacctgtggtccgaaaacattaaatggaaatccggaagtaaataattcatcagttttaaattgtgcaccgtcctgagtagtgtgatggaatctcgcaccatcccttgtgccctgtaaaatgaaggtgtattccagagaacaaaggaaggatggagcttttatagagcatctttctgcccaggtttgcattcaggtatattttttcaaatgaaggagtccaccttgcttagttcaggttgctcagtgcaagtgatttctgattggttggtgcaggctatacagtctgttggttcaggtggcctgaacaggaatggtaagctgcgaaggttcggagttaaacagatgtgtaggttttctggaaacttggggtacatgtgtgaccattagactcagttagcccctcaggattcatcttgagggatttgctctttgaggttcacagtgatcagatcaactgttgcagtatctcagtgcttgtgttcaagtaacccttattttaattaataatgaccacaaagtataggagtagtgttgttggcaattaggatgtgccagagagaagatagaaagtgcttcctttaaatgaaaaggtgaacgttcttgacttaagaaggaaagagaaaaatatgctgaggttgctaagattaagaacaaatctatccatgaaattgtgaaacaggacaagtaaatttatgctggtcttgctgttgcacctcaaactgcaaaagttatggccacaatgtgtattaagtgcttagttaaggtggaaaggtaaatttgtgagtggaagatacgaaccaaaaagatgttccaattgacagcaatgtgttgtgccagaatcattcagcctatatgacgacttgagcaagggatcccttgaaatgagttacaccaagtgagggatagttacacagattcaagaatacagataatcagtagtagcctaatgctgcgtcacaatgcatacgtctttcaccctacttcatctcattacataggcattgtaccatgtcacatcattacaagaagaaaggtgagtatagtacagtgaaatattttgagacagcccatgttcacataactattattacagtatgttataattctattttattactagttattgttaatattttattttatgatttataaattaaactgtatcataggtaaatatgaataggaaaaaacagtatatatagggttcagtactatctggtttcaggcattgactggggcctttgaatgtatctcttgcagataaggaggactcttgtacatcatgacatgtgtggatccaaaatctcaaaaaaacaaaaaacaaacaaaaaaaaaccaaaatctctttttgtgtgtgtacatgaattgttccagcaccatttgttgaaaaggcttcccttccttcactgaattgcctattcactttcttggaaatcacttgtccatgtatgtgtggatctatttttggactctgttttgttccgttgatacatttgtgtctctttgcaaccactctattttgattgctgtcacttcatcataattcctgaagtcaggtatcattagcctcccaactttgttttcctttttagaaacagcttgttagtttctaccaaaagatatcctgagattttgactgggattgcattggatcttgtaaatcaatttgggtagaatagacatcttaacaacatcgagtcatttctgagtctctcacatgtaaaaccattatctgcgtttaaaatgtaaaccactcagtgtcaccgatcataaaccaaaagtgatacttagggtaccttgaaattacattaagcagaacactgggaattggtctttttgcttgatttgcctgagtgattctccacaaaatccccacttaatatgataggtatgaatacgggatgccttatccagagcagctctccacaagcatcctcacgccacagatgccagttgaccgttacgtgtactcacctagcctgctggtacctgccagatggtgggcattttgggtgagattatgatagatttaagccagaggttcaggaatatccacattctccaaaaaagaagattaagccattattattgggagcagcctaattctagttatgaaggaaagagatcagggtgccatatgtacttagatagccatgtcttttatagcacatagcctttcatgttaaagctccgcatttttctaaaggagtattgattatagtaaggaagccaaggttcaactcgtgtatgtgtcaggtagctggatcattcattaccaccataggtgacacccatgttgatcagttacataaagaccacaaatggaatggtaactgggtcattgcaaattaaccctttctgaaagacagttcaggacatatttatccttgagagtgagcctacactatcctcctaagacctctcttttaagtggagaatatacattttggaaacaaggttgtattgtggttgagggcatgaagtcaacctgcctgagttcaaatcaccactctgcccttttctaacttttcaaatttagggattcacttagtttctctaagcctattttctttgagaatatggaaaattattatagtaacatggggaaattaaaagtgagtaattgtacaagtttagtgcacttgatatgttttgtttttagcatattttctccatttttcctttttccttttgtgtgttcttgttgccagtgactacctgtgaaatgtaaactgttgagtgaactgcttttgctttactttctgtgaattacttgttctactcactgtgttctgtctcttccattccctccgaacacttttgatcttttcgttttgccccagtcttctttcatttaaaaactaatttctcccaagaagcctgctctataaaggatgtgtagattagatgaggtgtgggaagcatgtttacttataaagcaacacaataccctatccatatccagcctgtaaaaataaaaatctaagtgctttttttttttttccctcccaagtaaagagaaaagtttcagggttatatccttaacatgtaattaagagagttcaagatattttatgttctatatagcaatgcagagaatatttaataagcattaacaaaaaaacttaaccttgtggtagatagcattgtactaattaacagtttattttatttagctacaagaactatgtcagcatgagagctaacactacttatgtttgacaattttagaataggaataaggtaaaaatactcaacagagataatggtagcttgcaaaccgtttatgtcaaatatattaaaatttggaatagttgaagactagaatccaaattcaagagtaattaaccaaaatagttgacagatgtcagccatgctaataaaatttgtataccctgaatattttccagcttgtaattaactgcacagatgatgtgatctgattttgtcactaactgcttattaatgaaggagatgatgactagttacaaaatccatagtgctagctgaattccaagtttaaatgtttctcatacagccggcattaattggagccacactagcctccatgctggtttgatttgtgcttactttcttcatttgtaattgcgaaggggaaactgaatttgttaaattcagctctgagtgaccttgaagatagtaaatctgtttttatttggtggtcagcagcgtaatggcttttatttttagattctttcttataaatgtattgtcatcaggctagtgatatcaccattggaagttgtataataaagtgcaaactgattatttcaagttcagctaaaccacagcagaacatgatgtcaatatgactgaagatgtgaacacagagtgctattaacaaatggtttaataacaaaagagcattatttatttctatcatatacatagcacggaagcctgagaagaagcaaaaggattcaagagaggcggttgtgcagccttcctgcctgcgccagctctctcccagactcctatactgctcttccttctttaccttacgttgctgtttccctttttacttctttccctggaaagggcgggtttaattctgtccttatttataagacagagatgtttgctacctcctgagcccaagtctgccagctgttggccttcttctttgggtggtctccctggcagtgtggtcttacagtatttatgtctgcctgctagctggttttgcctgttggacatctccacttggatgtctaccagacatccccaacttccatgttcttagtgtcactttaattttcctttccccaaattattttctctaccgtagtctcttctttcttatttttgtatttctgtgtttaggagtgcttaatgaatatttattgagtcaatgggtgatttcatgatacaattatagtagcaggtagtactaaaaagaggaactattttctccttatttaagaactttttataagagaactctagtttttcaaaattctgtttaaaatgggccacccagaactggacacactcttctgttgttcgttagtgttcgccttagatggccccacctctctgtcccctctctctagctatgtatatttcttttcaacagtcagttgttagattgctgtccttgattggttttctgttttcagtaggccagtccccagctaaattgggtgaccaacttggctaatgtccagttttatctaaagtgatgttccctgtttgcacagatgactttttaaaatctcctgcaaatgtgatcccctttagagccctacctgcatggtttgaatagcctcagtagccaatttcacaaacaaaaatgtaaggtctatgtgatgtagagtaataagataagaaactatttcctacttacaaactactttgaaaaattttgaaagatgagtttaaaatgtttaaaacattggtaataccagcagagtcagtaggcatatttgtaggatacttagtataaattttggtgtatttattttcttaaaataaatcacagtgaaatcatattattgtatcttataaaatgccttactctgttgaaaaggcagatttatattaaaaacctactagctgcatttatattaaaattgttcaccttattaacaggtcaaacaatatattcttttaagaattcacattttaacacttgggtttcagctgataaaacttatatgcatttgggtataatcttagatacctacaaaacagcaccaagacaaaaatgggctcaataataatgagagagcaagtattttaaagaaaacagaatttactgacttttaccatggttaggttaagttaggttaaactgtggaaggaaattgtgctgtctctcccctaaaaagtttaagagcaaattatcatcttgaatggtttagttattcacatgactgaagttaggaaccattccttttaactttttattttgaaataattatagatgtgtaaggacttgcaaagatagtacagagagctctttgtgctcctcacctggttgctcctaatggatattgcttatataatttagtacacatcaaaatcagaaaactgacattggtacaatgtatatgtgtggttctatgtcattttatgaaccttccttgaactcttcttaccccacactgtttataactgtcttacatatttcttctacacacattaagaatcacattagacaatattatttttgtttcagccatcaaacataatttagaaaactcaagagaagacagtctattgtgtttacccatatttttgcttatgttttttcttccttcctttccttcctgatgttctaatattctcttatcacttttgtttttttcaactttctttacatattcttgagggtcggtctactggagacaaattctctttattatttcaactgagaatgtcttaatttttatcttcatttgccaaggataattttgctggatatagaatttgcagttgacagctcttttctttcagcccttgaaaaatgttctattgctcccttctggtcctctttagtttctaatgagaaattctgtcatttgagttggtttccctgttaggtaagatctcatttctttctcaagacatgctaataatcataagattggttattgtaattcaagcagctactatgtgcttggcatggtgtatgctgtctgtaaccttgaaaccctctattatctctattttgtggataaagaatctgaaactcatgcaagtacattaacttagctaaggtcacacaatttagaaatgtttgagttaaggtatgaaccaaggcttgtgtgcatctaaaatttttgcactttatcatacaattgcggaaagttggagacaatcttatagttgataagttttctaccagcatcttacagcaaaaattacaatttttctgccagtcctttctttgactttgagtagaatcttaaaaagacactgtgtaagagccacgaaacttccttgcagaagctgtatcatgctaaatgttttggatcaattcaactcaatttaataagtctctgcttttaatttcattttctcaccgtgcattataaaatagcatttgtagaataagttaataataattttaagcaatacctattttcaaacaagacaaaattattattctatttgaattcaatccctaacaaataactagtatcaaatcagtggtactgcaaagaatagttaatatccagggtattgttttagctgcaagtgtttgtggattactgaacagtcaagtgggtttgctttgagattattgctttcccatgtgtttattctcttcacagtctttttcagttgttgcctggttcatctttttagacatcatgtaattggtagaacaacagtcaagaaaaaggttgaaaaaaaatacagatgagttctctggagatacgatgaagcaatctgagtgaatcatgatgtgcagtgggctttaggtttctatttttgtgcaagggaccgattatagagctctgaacttgaaatcttattaaaatctctgaagatgcagtagaatacatctcatttaagaagtgttctctaagagatttataattcagtattgtttatatatgtcttagtatattagatattattcattaacctatattagaggagacaatattttacttaatattttcttaagttacaaaagtaaaataacttaatagtaacaattggaatgattaacatattgtgaagcgaaacttatctttaccctagctgattgtgtaccatctcttctcaaataatgtgatattaatctccaactgatgttaacattgtagggtgtatctcttcatactcttccccatgctcaaacaagtacacacacacactcacttactcttcacatgtgttggacttcaataataataaatgtatgcttcataaattggaccattcgctaagttgccccccaccccattcttctaggacagtatgtatagaacagaatcacttaaaattaactggagtgtattctatagtatgaatgtactaattaattcagttattgcatattgatgtacatttgggtggcttcctgtgaggtattgttttttgtttctgttataaacaatgagacggtaaatatcttagcttatatatcttttttttttttttttttttttgagatagagtttcactctcgttgcccaggctggagtgcaatggcatgatctcggctcaccgcaacctctgcctcccgggttcaagtgattctcctgcctcagcctctcgagtagctgggattataagcatgcgccaccatgcctggctaatttcgtatttttagtagagacagggtttctccatgttagtcaggctggtctcgaattcccgagctcaggtgatccacccacctcagcctcccacagtgctgggattgcaggtgtgagccactgcacccggcctatatatctttattcttacacaacaatgctttgatttccagagggtaggtttctgataatgggactgacagttcaagggatatgtatacttaacattgtatagatattagtagatttctttcctaaatgtttactgcagtcttgtataaggttcattttatcacatctttaacagcactaggtgttatcactctttaagcaaatgtgatcggtgaaaactgctatctcgttgctttaagttgcatttgctgaatattggtgaagttgaacggcttatgtttattggccatttcagttttgtcttgtgtgaatttctgctcatattatctggccatttttctattgagttgccttttacttaccagtttctgggagtagtttttatattagggatattaactgtttggttatttattttggaagttttcccagtctatgtatttttgaagtggtttagggtatttttttttgctctagaataaattaaaatatatgtaatcacattgatctatctttgtttaggttttccatcttagttctacaaatatttgcctaaattctcttatgaatgttactgtcttattttttatataaatatcttttaattcatctggattttacttctatatatggtgagatatgtgagtcaagctttgcatttttgtagatatctagccacttattatgctaatgccatttagtaaataaaccaccctttctttctgaatttaaatgccatcagtactttaaaaaaatatttaaatggttacatttttccccagcttaacccattttcagtaaggtaatgactttttaaaagcaggatttagtaagttgaaaaggttatttctctttgctcaaatgtcaaatgctacctgttactctttattgtttctggctaaaattgcgagcacaggaaggattattcctgcgaacaaattcactaatcagcttgcaacctaacaattttaagaccctggggaaaaaagggaaagtttgggatatttactcatttcttctgtaaaagcaataacatgtaaacatagtgaagaaaggcatttatggaatctaagaaggaaagctctttgcttttcacatacagagaaattaggattcattgagtcctttctttacaacataagctctgtaggaatggttctccaagtaaagctgtgtgtcacgttttggggctaggggtgcctcaaagctgcacctacagagagatctgaaggcaaattgccgatttcacacttttattttgggctcatcctttatgccctgcacagagcgatcagatccatacacatcttactttcattcattgtggaaataatgtcctcaggcttggtggtacaaaatcgtgctttctacagtcttctgctaggaaatgtttattggatttagctgccattatacaaatgatgaaggagaggcaaagtaactccagtatctctagccaggagtggcttgaagaattgtatcagttacagatttgagaagatttgactatatgttgaattaggttagatcatctttataattagaagtaggcttttggagtacaaagaattcttctgtaaacaccttgaatatttaacaggaaggccataaggaaatataatgtgctacattcctaggatagaataacatgcagctattaaatagcacattttgtgaatatttaatagtagcatttaaacccaaaagacactgagcggcagagacctgtgtaactagtttgttcgttcatttcttcattcagccaatatttactgaacatcagctgtgctttcagcattttgtgaggctctggggaataaagatgaagggtgtagtctttgccctcctatagcttaggagctagtggacactcaggttacatcattgcagaactgtttattaacaattagccacgtgtccaggatgccatgaaaacgtagaggggaacacacaaatcagactggctgttggggggtcgacgagacttcatggaagtggtcacatcggagctgcgctccagaggaagaaaggaattaaccaggcataaaggttgagggtggttggagggagaggagctttcaactaggggtgaatagtaaatatagacactgaagaaaaatggaaatgtgtgtggtaaagtccgttattctgtataattggatcatatgtatgtgcacatgtgttcatatttatcgatatgtgagagatgatgtatagagtttggtaatagtgaggaagacctcttaccccaaactaaggtgactggttttgtcttgaaagtgggttatagtaagtaggggagtggtctcttcactgctgtttagaaggacttctctggacaaatgtgtggatgaggtattattaagcccaggatcttgaagatgagtagaatggtagcataataatctgggtgagaaatgtttggggcagataataaagtgggatgtttgagagagattttaagaagtagcagtgctagcatttgggatataaaggaagggaaggggtctaggatgatacgtagatttctagtttggaacaagtagacttgcagggatttggtttatgaaaacgaggggaggaatgagtttgggaatgggaagctagtgagttctgttttagacttaaatgtttggaggcttttagggttttgtggggacaaatgaagatctttattggttggctgaatagatctgaccttagctcatgtgaaaagagttggagattttgacattatcagtgtatataggtggtattttagtcatgggagtatatgaaattgcatagatggaataattgcatgaagagagaagagggatgaagatggagacatctaagatgtaggcaaaggatcacaagaagacactgagaaggaatggcaggagacataggaagaaaataggaagagaggagttttgcggaagccaaaggaggagaaagtttcataaaggaaacgatagtcattgcagtcagatggcacagagatttcacatcagctcatcctcaaacctgtctcctgggtttggcaataaagaggtcatcagtggctcaggcaagagaatgggaggcaaagtgagaggagtttataggttggctgctaagtggatgatacagtagctgggagatgatgtagggctgagcgagggtgtgggtatgtaagatgaacaagacgtgagcaatgtcctaaatctagggatgggggagagggtgaaaatataggagaaaggggcaattgttgtgaagttccaagagacaagcccggagttccaggaaaaatagggaccgctttcccactgagtctggagagaggaaggaacgttttaggatttaaggcacaggcaagtttgaggtagggcagagtaggccagggaagaatgcgaatagctgcgtttttgtttgtgaattaaagggtacattctgaggaaatggagggaagagagagggtcaggggacttggacacggggaagggagctgccttgcactgaggcctctgcagatgatcacactgcatcaatgtgatcaaaatgacgtcagtgttatcagcagtagaatcagaaacaagtcgatttcatctaatttccattatctttcactatgtgagatatttttatcctgaggatttacatgtaacataggactgagtgatttactgaaatttaagctacagccaatatttgattaacaatacaggtatgaaattaaacagtactgtcggccaccaggggttctactctgcgtgatcactttccattttgctctccttcaaaacgtccacattttttctctcagtcataaacatttaaaaaccaactgtactgggccaatcaaactagtgtagtaagtgaaagacttagagaagtgtatgcaggtggtgttgggcaattgcaaagagactagcctccaaatgggagtgttagcatagcacgcaggcttctctccttatgagctctgactccaatattgactcttttttgtatacagaaaacataatctgttcagaactcattacagtgaaggaacttgtattttaaaaacagagatagagaactaaatttgtattgagttaaattgtataaattctttaaggatttcaagggtaagccgactcacatgattaaagtaagttatgagcatttttgtttatctgttcagtgtgtttggggcttttgtcgtgtcagctttctttaggacaggtagaattttatctaacctcttaagaacaagtggttattttctcaaggactctaggatggtgctagataccccagattcttaggtgctggctttatgtgttgcctttgctaagcacttggttgctttctgccactctttggaagcaggtgattgatactagaaactgacaggttgtgagtgatgtacccttccattaaaaacagatatactaatttgcttttcaattgtagagagcctcttactataaacatccctgtaataaaggtaaccttataattagtatgtcaaaaaagcaagaaagttatgatgaacatgcattaataacaaatcaaaacctttactaataaaatgtcacattgagaggacttaattttgtgtacactttcatactaatataaggcactcttgctaatagtgaaagatggaaatatttgccaaccagctatgttatagaagaacttcctacaatattgtcctatgtacggtgacatttagaattcaaggaaatatacatagtcattgactttgtgtggaatttccctcccctcctccaccaccctgttagaaatccccgctgttgactgtttccagaagtcttgcagggtgttgtgataagagtccaattcctcttcccattcctgcctaggtcatctctttcttccctccctccttttgttctgtgattctttgttttatttttcaccacagaacatacttcattatgctgcccctgttaaaatcagttaccctattccacctgattcatccttgagaaaactactcatggccattgtgggttttaatgccactgccatccccgtcttgccattgcctcctcagctctgtcctgctaccacgatagagtggaccctgtgtcacagcaccattggtacccatcctgccactggtgtctagaactttgagcagtttaaccccccccggttttccaactctttccctcaccaacttgtgaagcctctgaactggtatctgagcagagccagtgccttgcactgtgggagtttcctgtcctaatgcttaaacaatggctctagaacttggctgggcatgaggaacatcactggcttgtaagggatgcagagccctggtcccctgaataagttgccctggtgggccaaataatgttattcctcacatttggtatccacatcaaatccctggaacctgtgaatgtgaccatttggacaaagggtcttcgcagatgtaattaaattcaggatcttgagatgaagagattatcctggattatctggtggaccctaaatgccagtacaaatatccatatgagagagagacacagagggaggggaagaaaggagaggaggcactgtgactgcaggcagagattgcagtggcgaccacacaggaaggaatgccgacagctgcctactgtaagaggcaaggagcagatttccccttagagcctccagagggagagcagcctggaacttctgggctcaaaccatcctcttgccacagtctctccactcactggcactacaggtgcaccaccatgtctggctaattttttttttacttttcatagaaacagggtcttgctatattgcccaggctggtctcaagcgatcctcctggactcaaatgatctcctggactcaagtgatcctcctgccttggcagtattttttttaatggcactgagagacagtattatttcctcccggcacatttggattgactgttaagtaatcacattcatttcctgattttgatacaatgtacgactggttttgtaggagaaaaagaattgggaagttttaggaattagaagttatgtagatttttaaacattgagaactttgtcattttcattaaaaggctaacttttttgttataacttatttcctattcacagtacatcaccagctgcttttttacttatataaacttggacccgagatcaattggttgcctgcttactcattctataaaaatttggaggcaccatacagtaagaatacataaaaataatttacatcaaggaaaaccaggtccacaaataaaatcgatacagctagattatgaaaatcaactcactttctagagtttcatctttatcattcattttaatgttacgttttttcagttttcccatttaaaaatgaacttttattaatgcatttcgattttttcgtgttccccaagatttgtgtgtgtgtgtgtgtgtgtgtgtgtgtgtgtgtgctgtgtacatttaagtctatgcaattctgttacaggtgtgggtttgtgtttccacagtcaagatacaaaatagttgcattactgcaagagtcccttgggttgtcctttcataactatcccttcccaatctctgatcagctgcaataacacatttgttttccgtttctataatacggtatgtaaccttttgggatttgctgctttactcagcataattctcttggaaataatctgatttgttgtgtttatcaacagttaattcatttttattgctcaggagtatttcatgatatggaatataccatggtttgactcttagccctttggaggacatctaggttactttcagttgttgagctgctgtgaaaatttccatgcaggtttttgtgcagacatcactttccatttctctaggatctgtgcccaagtgtgtaattgctgggttgtatagtaattgtgttcagtattataagaaactgccaaactattttccagagtgactgtaccattttactatttcaccagtgcttgagtggtaccgtttctctgtatccttgcctgcatttggtgttatccttatttttttattttagatattctgataggtatgcagtgatatcttgtggctttaattcacatttttgtaatggctactggtgttggatatcatatgatatctgttcgtgtcatttgtccattttgtaattggatttttgttttttttttactgttgagttttaaaaatatatattctagatacttgttctttgctggatatgtgggttgcagatattttctctcagtctgtagcttgtctcttcatcatcttacgagggttttcacaaagcaaaattttaaattttgatagatctaatcaattttttctatatggatttgcttttagagtcaattctaagaactctttacctaccattagttcctgaagattttctttcctttttttttttttctaaaagttctatagttttaagcattacatataagtgactcatttcaagttcattttctataaatgtgagacttgggtggagattcatttttctttttaattgttcaatggatgcctattatgccagcactgtatgttgaaaagaccattcttgccctgaattgctttttcatccgtgtaaaaaattagctgggcatcttactgtgtgtctttctggcttctctactctgttccattgatctgtgtgactcttcctccaccgataccacacagttttgattatggagctatatggtaggccttagtattggatagagtgattcttctcactttattctctgtcaagattgttttagctattctaggttctttgccttttcatataaatttttaaatagtcttatctgtgtctgtaaaaaaactttgctgagattttgataggaattgtgttaagccaatagatcaatttggcgaggagttgacattctataaggtgacattctatgcatataagttgacattctatgcttagtcacaaattctttcagttttccttgtcttagaatgttcttatttgttgttcattcctcaagggtgatttcactgatgtagaattcatggttgacagtccttttctttcagcacttgaaaaatgtgttgaaaaccttctggtctccatggtttctgttgagaagtctgctattatttgaattgttattcctctataagtacagtgttgtttttctcactgatttcaagatctttttcttcagtttttattaatttgtcttgctatgtttttccttgagtttattttgtttgggcttcactcagcttcttgaatctgtagatttatgtcttttgctaaatttgggaaatatttagccatcatttctttaaatattctttcagccccagcaactttctcctctgcttttgaagctctactgacataaatgttggatcttttgcttttgtattacaggctctgaggttcagtcatttttctcccagtctgttttctctctgttgttgctggtcaattccattgctctatcttcaagttcactgattttatgctttgttatctgcattctcttattgagctcattcagtgagtttatctttcagttattgtatttttcagttctttaactttcatttgtttttaaaaaaataacttctagttctagatttttttgttttatttttttccgagagaatacatagttgcttgttgatgtatttttgtgatggctgctttaaaatccttgtcagataattccaacatatgtctcttcttggtgctggcatcagctgctagctttttctcactcaagttgtgattcccctaggtttggttgtgatgtgtgactttgaagtgtctcttggacattttggctgttatgttaggagactcttggtcctacttaaacctgttattttagctgacagcccccttagttaggtttagcactcaggttctggcctgcttttgtgggtggttccaatgagacctcaattttagagcgtttgtcttgctgtttgggtgtcttttgttcatctgctgccgataggactcccccgatccttgcaggtgcctctcaagggtgcacaaggtgcttccgcagtcctggctgcctgggaactttaatgggggaagggagtctggaaagaagtgcttctgaccactgttgtcagtgcggttctctgttgtccgcttttctggtgccactgtgcttacttgggtgtcgttactgggattctgtttggtccgggcaaggagtgagcctgccttagctgctgcctttggttgtttgtaggtcaggaaacacggggcctggtttgctttcttcccttaggtgaggttcataagatgccctgccattacgttgtcccttcagtcttggccttcctaaccagttagtttgcctctttccacctttcttcttgcaggaagaaaatttaacttttttttctgattcttgtgcctttcccgagccaatccccacagacactatacacaatgtcttcttatctccctttaccttcccactgtcacaacttgtggttcaatcataatgtggtgtgtacatccttatgactattaattattggtcatagctgacccatacagcatacgatgaggatagctcctctctttccaggtttctgttttgcctggttggattctatgtatttatgattagctcatctctaaactgtatgaatttcagcttaatatggccaaacttgttgactggcttattatttccttttccttttcttcctggagatcttcctctaagagctacacatcagtatgagctgattgttctctgggtcttccagacagctctcatcttggcacctcacaccaccaccttctccctgtctcctttgttgttaccctgattccttggactccatgtctctctctctttctggttttacttgtttattggagcacaccttctgggagtttcctgagaatgcatgtgtaagaagtaaatgtttagacacttttgatctttggaaatgtctatattttactctcacacttgtctaggtaaaaagttcttggttgaaaaccattttccttgagaattttatattgccctttgccttatagcctccagtgattctcttgacaatggaagtgacacttggattcttttttgtgtgtgtgtgtttttccctgttggaatactcttacttgtctttttctttgatggtttgaaattttgcattgatattcgttgatgtggcatggtggccttgatctgggtcttggtgggttatttaatctggaaactaatgtttttcttttgtgggaagatatattattttcccagaaagaagtaataaaattatttctttcccctgttgtctctcttttctctttctgaaattcatttaggatataagctctaaaagtagagggatttttgtctatcctaagtgcctagagcactgtttccatagagtaggtccatataatacatgtattgcacagatgaataaatgaactccttctatgtggctgttaagtctcctggatttatcttcaaatttgtttccctcttttattgctcagttctttttcaggccatctacccccttttttcttcagaatttttttttttgtacttttttgtaccttttctaaggtaacagttgtggcaagaaacagaaccatctacaagtatacaacctacctggaatggatttttacaattccagagtaggaggtagatagaggtcatgatttattgttttctatataaatgtctgtttgatgcagcatcattataattaacataatcatcctttctccagtgcagcgcagtgtcacctttgtcctaaattgagtgactttgtaggactctttctacttgctccaggaaatacagattacgtttcattggtctgttttgtctacctatgcaccattatcaccgtatcttaattaccgtagttttacaaatagtctttatgtttggtaatgaaagtgctctaaattcattgttcaggattgtcttgatcattatttaatgggggaaagagttttaagtttccatgtaaagtttccatgtaaacttgtagaatcaattgtcaaatgacatacacgtaaacacagaccaaaaaactctgctcagatttcgaatgagattgcattaaatctatagattgacctgggacaattgacatcattatagtattgtatcttctaacctatgatttttgtgtattctttttgttgtaactcttgcattttatctgaaattgcatgagaagttttgtctattctttgaagtaccttgttcatttcataggaatttggtactgtatttgtagtacctttttatactcctctttatgtaaggtatgctttcagttgtcatactttttgtatggctcatcacttttaaatgttgctggtttcaaaagacttgaaatgcacaaatcgtttgctgtttatgtattagtttttaacattatctgatgttgacaggcagtcgatatagtgctggatgtagccactccccagtgccatgaagaacccagtttctgcctgcctttctgcttctccttccttaatgtgttaatttttgttctgtgcttttgccttatagttgaagcatcactttcctgtttcaagaaggaagtggggaggaggacaaagggacaaaggagatgtctgtagaatgtattggctctcttttttaaaatcagggaagaaaatgcttttctaagtccccaccccataaattgcttcgtcgcatattgttgggaagaccttggtcacatgaacctcctggtcgatcatgaatcaagggtagtgagatggctccacttggtttagaccagttgtgatccatgtccttggcctggggtaggggccttcccttcctctccagtactgtttgaactgattgggattccttgaatagaaaaggagagagaaataatgtgtaggtaagagaaggtatctctcgtgtttattgaggcttttcaatatgtaatttgcttttaattttaagaaacttgcctgcctcttggatagcaaagaaagtgatttttatttgtattggtcttgcttttgccaaacattttaaaattaagtgatttggggataagtatttattttgaagtctattttattgtttattaagatatatttcaaagtggtataataaatgacattattattttcataaactattgcttcctgaagtgtttcaagccaaataaacatttatctttttgatgggaaaatgctttctaaatttccctcagccaagttatagaatggagccaactgcagtacatgtgggtcacaacctgcttgccatagttgtattctgggatgattgattaatttatgcctttcataaggatgctctgagaaagaaatgagtgagaagatttaattactgaattattaacttttaggagctccactttggaatgtgagtcaatatctattacagactgtacgtgtttatgctattgaaaatatgaattaagaattgtctttggttatttgacaactcaaaagattttataactttttgtgcagcttaaaaaggaatttagaaatgtacttttagaagggaaggaattcggataatttatatgtcagtgtgtcataataatttatttacaccaaaatctcattcacagattccagatttaatgacctgaatcttgccatttcttttctttaggcctacccttattttataggttctataaaataatcggaaaggaattagaaatagttttgtgtgtggtgtcaagtggctttgtttaatcattgggaatgaatcagttaaaaacttattttggggctaaaaacagccagcccaattgttataaattggagaatgaatgaatatgaaaatctacttacagaaaccattttaggttattcatatttcctgcttgctctgtttcttgtcatttggtattttaaaaataagtcttagactagattcttgactaaatagcaacctttttatctttgacagagacacgtttcttacattataaaaacatgaacattcaagaataaatcacagccaacttgaggaccatacatatctgacttggaaatttgctaatatatacagatttaacgggattttacacattttcgtgtttttgagggcttgtaaggtttcagtttgattctcatatatgatggttgatgtgttgtacaaaccaattaggagagcaatctagcaatcccttgttgagttagaagtgtgcagaccctaggacccagcatttaccttaggcggtcttactgttgttgcatcttggctttgtctagtttctcttgattcctgtccatttttggaaccttgttttctagtcactgtgacaattctgtgagcgacatggtctgtttcccataaattctttgtctgtttgatatagctgaagttgtattacttcaaaccgtaactctgagtggtataacaaagatatcaaattttagataacacccacatcttcctgagcatcgtgtgattttagtagctagaatttctttgtacagaagtcattgtggagggaaatgatgtgaagaaaagaaagaaaatcctgagaacagagcaacagttgctgtggagtggcgtgagggccgaattcaagtataaaaatctggattagaatcctccggtcacttagtagttgtgtgactttggtcattgttgaactgttgtgaggtttccttttcagatcaaaactttcccttttccttctctcattcccatcttttcaacagatgacatcaccttatatgttacagagaaacagaagccattagatggaaaaaacctcaatatccaacttacagaaatgactgacctgcatttatcttcagcatttcctccttttattaaatatctgaggtcagtatctccacttgggttttgagttccatctttttctgtcttcctagggaacatgtactatcaatttatcttttccctttcttgaatacccaacttgttgctcttaaccagatcagtttcatcggcatttaagcatgttcaagactcttctgtattaaaaaagaaccacgacctcccctaacccttccctaatctaactactgcaccctacctcttctctttgcatttacagcaaagctcccggaaagagttgtctgctcgctgcctcagcccacacctttttcatgtggtttccgcttctgtcattctatcagaattgctctgcagaggctgatcagtgacttcagtgaaaccaggcctaaaggatgctcttcagttcacatctcactcctcagcagcattcttcaccgcttgccgctctatcgttttgaaatacctgtaacaagcatgctgccttggtttccctcctaaatgacctctgctccctctcctctcaatatctttctctcttcccccctgccccgccgaggttgagtatcattataatatcattgtctacctattattgaatgttagcatttcccaaagctagacctagttctgttccattctcaacctacaatcttttcctaagctatttcattcatgtacatagtttgaattgtccttttatgtaatattatagatgattcaaaaatttatctgagctcccatcacgtctatctacctgttaacttgatatttctacttatatctttctaagccatctcaaactcaactcgaactagaccaaacttacctatctacctagtccagctgtaccataaactttgatgccttattcttcttgatgcctcatccacattaactccacttatcaccatattttcacctcaaacacctctgtgatctctcccctcctctctctattgccgccatcctaatgcaagctgtcatcatctctttcttggccaactgtagtagatgtagtctcatccattgtggttctttctagtctgtctgggactcatgacatcgtgcttttgggaaacagaagtgatatcatgttacccccaccaggttatccttgcttgccttctcattgctgtaaggataaagaccacagaccctcacatggattttacctccctgggctaccccatttggcagctcccccgtgtgttctcccttcctttcctctgagaggtgaattgtgccttgttccctcctgctatggggctttgcacttgtttcttgcccttccttcatcaacttgttatctaactctatcctgtgctttagatcttaacacaagtgtcatttccctgactccatggagatggggtcgagatttgtaggctttgcttattcttcatagtcctttaggtttacatttaattttgtgaggatttgattaatatctcagtaaccatgatagcaagaatatctttttgtttttgtttttgttttttcaccattttaactttggtgctgaaaaatacttgtcatatagttaggactcacatattcatgaatgaatgaatgaatgaatgaatgaatgaacatagattgagttttgagccctgcacttaacacgttctttttgtgtgaccttggacaagcttttatagaggtcagttttgctaaaagccttgcttcctcacctgttaaatagggataataattatatacaataatataattgaatgaaaagtgcataatttagtgccagtaaatgggatcatttagccatgggatcatggctttcactactggagtatttacaacttctgttttgctaaagtaggtgagttttctgtgcctatttaaactactttatatccctcaggaaaaaacgatggagccagggcttaggccttgtgaggagcctcattcatttccccctctctgctggtctcactccttgaatgctggtctctccatacatttctctgccttagtgtctgatggcttttaacatgttccctccaggacaggccataggaggagggtctaatgcaatggtgactttggaacctgaattggcttcttggacacattccaggcataagggccccaaagttcttttgttctgccttaggcatgtgtaacctcagggctttttctcccagctctggagcttcattacccagaggaccaggcagatgtcaaatgtttctcttacagttcatttatatttctctgatagctttaatctaaaaataatcaaaatcgttgtatatttttactgtgacttaaccaattgtaaaaattattctaaaaatacgcagttatttctgagaacaattacactgacgcatcgttccctgagtgaaacctatacatacatgttccaagtatatgaagcagttttttggggacagagtaacttttttttcccctctgttgaaataaggtattgggccaggcatggtggctcacgcctataatcctaacactttcggaggccaaggcgggaacattgcttgaggccgggagttctaggccagcctgagtaacatagcaagaccccatctttacaaaaatttaaaaattggcccagtgtagtggcatgcctgtagccccagctacacaggagactgaggtgggaggatcatttgagccgaagggctcaaggctacagtgaactacgatttcgccactgcactccagcctgggtgatagagtgagaccctgtctctaaaaatacaaaggtattaaagttaacacttgaaatgcctttcattctgtcagtggctctttttttgtttgtttttgagaaaagctgttttttcaagtcaacatttaaaacaaggataataaatgaagcatgaagcaaatatgtataatacattattcccgttcattgtgtatgtatgtatatatatatatatatacacacacacacatataaagtactttggcagaaatatatttcaattttgacttatttttcagttcagtttaacaggacacactaatgtcgggacagtctttaaaaatttggacaaatttttaaagagtaagttgtgacaatgatattacatgttaaatttgtccttgggaaacatagacatttatgtgattttttttccctttagtatttgacatcaaactatagcttccactgagtagttttaaaataatgtacttcgtgctgctaaggctaacattgttgctaaccagaggaaccacagaggaagacttttgaaagagagggcacaaactcttacagatgtcaagagtcagaatttacatgtggtggggctaatccgtaagtgagattaccgttagggagctccttgacgcaaattggcattgtgcctgcacttccgtgtgacaagtgggattctcagggtgagccctagagtgtgctttttgacttgtagcatctctggattctgggctcaagcagaggccctcctgcccagttggccaactgcgacaatgaatggtatcgtctagaggtcatcataattctccccagcatttccataacacatacaaattaaactatgagtaaaaaaatacttaaaccaaaaataaaaatgagaagaaataggcatatgaaacataatgagtaacgtcagcataatttgagattttggcaatggaagactgaagttgagaagtgtttccactagggatactctcttgtgcctcacattagtgtgtcctgttatttaatacccacagaagcttccttttcttccttgaatggctttgcactgctctcattgctaggttcatatactgttgggtgatgggtgggatcaagtcccctgtgtgctgtgaacacacgcatcctgattcaccactttactgagggtgggaaatgacagaggttgggcctgtgttctcttgtcacctccgtatatgatcattcaggcgcgtgtctgggaaggtgtgaaggagtgtcctgtcagccagttgagaccactgtgttggtgttctctgaatggctttgcagcctatgatggagtactttagggagtcaccttttgggttggccatcagtctaacactccaagcagccatagggacgtgcagaggataaattcatataaactacacctaaggcgttcacacatggtccaagttgtctgtgaataaaaagtgttgctgtaattttccatcactctttttgtttgtttgtttttctggagtgataaagatggacatggaaccctttgaatggtgcttcaggaggggctggtttttctcttctcagatgggcaactcagctaggggaggtgaggttttgttacaggatatgccttgactactaccatgtggagcaggactgctggacatgttgccagccatgaccgagcacctgaaaaccctgtgggaaactacctgcctttcatcgagttattggaatagggagagccttaggagtcctaaggcagattttcagctttatatgctagttctgggagccgtgttctgcaggctctgccaaaagactttgacctcacaagtgagatgttccatcctgaagtcctggatgctgcttctcaaaacattaataggaagcgtgacatcaagccatgctggctctctgaagttggagaaatgctgcatgctcacttggctaacaaggtgaacattactctgtcaccacatttttatctagtatgcgtcctaatctcaaggatccagctaagttgtgtgttgtcagttggagacattagcttgggcagtaagctcagccttgcactgcttctggcaggtttactcatcttcatccactcttatctcgatatgaggatatctgttttttgagcatgttccatatccatgtttcatgtgaaattgcttgtcattcttgcttatcacttaaaataataactggctcccttcttttgtagcatttgctaatagtggcagaactatttatacgattatgataatctgtcaagaggattatgcaaagtatctccccccaccccttctctaaagcagagttaaattgaacactgtaaaggacattttcataaccaaggatttttaccaattatttactgtggatttaaattgatactgaatgactggaggcattgatttttaaagctggaaatatttacaaaccatccaattctttttccttagtattttgtctctagttacttcgaaatctctctcctctctctctctacacacacacacacacacacacacacacacacacacacacacacacacacagagatgtaaaacatacacatagaaagactttaaggaaagacatcaaaatggtaaaagtcattatacctggttggttgaattgaagttattttatacttctttatacttgctttcttcatggggaaagtatttttatgatcaataaaaatatttttctgtaatatgtatgtactactttacaatattaaagcactttcacatttttccaaaaattaaaagcacagtgaaatttgcacattgagaaacatttggagccaattaaatgccacttatgtttctctaaaaaaaaggaaactacttttattcatgtaattaagagccccactcatgaacattaaagaattgttgcccactgtacttttggtatatgtagaaatataaaaccaaaaatgtatagtataaaaataaaaaatatacaaaaagtaaaaatataccaataacccagtaaaacaggattttgattggtatttggagaaattagctagatgtttatctgaatagattttttttgctttttagatatttaataattatagtaaattattttaaagtcagtatctgtactaaagtatgatagaagttggaatttatgttttgcagctattaaattttcttaagaacaaagtttgtttaaaccttacattcaatttcttcgtttgtgatttctttccatagtttctttgtattacaaattgagataaaattaaaggtaaacttaatttttttagtaaagcatttgtgattggatagtgttcaattaaaatttgttctctaaatggaaatttagtctttttcccttagcattagactttattagcttgtttgctgataaatgcttggaggaatctgaaaatgcatcacaagtttattagagatcttttatgtagttattaggttttctggctttctaattatcatatataggtgatgtaatcattgttgtcatgtttttttaatgaagattttaaatcgttttccactgtagacatttataatgtaatctatgcaagaaatgaatatttatctcagtattttaaaatggaaaaaataaagcagagagaaatcataaagcagagagaaatcattcatttcagttgtgaaaagttcagagatatgtttgacattcctttagtcttaactgcatctgttattcatgcttttctagataactgtataatattttcttttactactaatgaaatgtgattctctcatgtccagtgatgtgttttctgaaatgatataaacaaaaagtggttaatatgattttattaactgtgttgggactcagaaaatatcccaaaatgaaggcctcagaagaagccttagaagcaaggctttctctgaccttctcctgccctcctgtctcagtcgcattctcccccgaatctacccatagaaactagaatttgtcttccccaaggcagatcatagaaaccagaacccctttccccatagccagccataaaacctaaaagtattactctaacttttcctctgcctctctgtgtaaaaactagccagaagaacattgtctgacctacggtgtttgactgtaggtcataacaccctcattccagagagtgtcctcccttatacccagaaggaaggagtattgaatacatgcccagagaggccaggaagaatcctgctgggtttccgaactcagtctgttagcattagatcgtactgtctctgttcaatagtatttcttgagtgttgtccgtattttgttaatcttaagcataaaagtggacaacttccctagtatctttgggtcttcattatgaaggcctctgtgtacacgttaataaattgggatgcgatttctcctattcattgtcctctcatcagtgatttttagcataccttcagagggtgaagggggtaggtttcccttgactcctacaacttttaacacaatttaggtatttccctaattgctgaagttaccatatgaaatattcttattaacaacgtgttaggcttaaaggccagtttttgctgatcatgtcattatgtactggctgattttatttatttatttttagagaccagagtctgttgtgatttgaaatttcgaatttcgtgtcaattatgtaattccatcagaaattccccaaaggacacacctgtaatcccagcaccttgggaggccaaggtgggagaattgcttcaagccagaagttcgagaccagcctgggaaagaaagcaaggccctttctctacaaaaaataaaacaaatgaaacattagtcaggggtggtagcacacacttgtcgtcccagatacttgggaggctgaggcaggaggattgcttgagcccaggagttcaaggctgaagtgagccatgattgtgccactgtactccagcctgggtgacagcaagaccttgtctcttaaaaataaataagaaattccttggaaggaattaagacctgcagtaaatagcatgaggtgatgtacacttctttagtatttcttaatatttgcagagagcttgtctaaattgtgacttagttttccggttagggcctattcctaggttgtttttgcaaagaaagtttttgtgtatgtatgcctagcttttccttatccaatgacctttgtaaagactttgtattctccatctaacgtctagttacttaaggattttctgagcagtttgcttgaagtctgtttttccttcctagccattgacagaaaacacatctgccttagtgaggcccctttgatcttcagagagctttatctaaagagagattaagaataaatctgtcaggcattttcccaaagaaattgaaaatgcttcctaagatttcagatcaggtaggtaaagtgtttctctgaattaagacatacgaaaataagtatgctagtcaatggtttcatcctaagttatagattgcagagatttgcttctggcatgaaggaatattttttatttcacccgagacacaaaatgcatgcagtaatatcaatggccagaagcaactgcttttctttcattcatttttccatatttaacactagcagggtctgtggagaagatactagagagggtccatttgttctcagcctttttggggcttagcatcacaggaagaattttcagctggtctagtttgaatctacatactaaaaatttccaagatccatatgccaacctcctttctcccttcttctctccctcctttaaacaaatatgcacagaatgcttattttctaccaaactctgggttcatactatttactaggagcaaacctaacagataggtataggatctgatacactgtgtgcctcagagatagtcaaggtactaccctgaaaacgtgtacaactatttaaagatctcatgaacaccctcagttttagtatagaaatataaaatttgtaatcaaacaatttaatttttgatacactattttgaccttttaaagagttacagctaagaacagctaatgagctgttaatttagaaaataaaatatatacagaagtctgctttgaggttcttagtcagtaagaaaaccttggggagagaggttaaactaggtacgctggagacttattatgactttggcagtatgaaaggacaggaaacaaaaggaaaatcttacaaagagttatagtctgatttctgaaatgaatgtttacttgaaaggacacagaaaatagggtgccagcaggagaatccagttttccaaattccttttccgaaatcccaggctttttatgaaattttgagagaatggcttaggcttatgttttccattttgagctgcttagaagcaaatatcatataaatgcaaatttctactattatcatttactcaccttgtattatgtgcttaaggagttggagaattcagaagctgtttaatatacaaggcattgcctataaaatatttctttgtgacataatttgcttatttgataaacaagtatctttctttcctcctccttataaacaccccaaattagtttctgagttgaccaacaagattccatcagcatctggcaattattttatctgtttgaggactattggtatatgggacatgagttgctattatttggtaacattttgatgtccttcatttccttaattagtttaggaaaactatttggattttatgtacaagtgcttgctaattacttgagtcgtgagaagactgagtgaggtccaagtgtcctattaatccctttgagtctgaacattttcttataattggtttggcaagaggaataagtgagactagttgctaatgaggagataagtatgtaattttaccatgatataaagctgtgattgtcagtaagtggtattaggaatctagattatttttattagaacttatttctttctgcaaaatcattatcatctcctgatattgtaaattgggttatttcacaccattatttttaatatgtgttaatcctcaaactacaggtacttaaaaccttgctaattaaggagtcattaataaagttagcaatatgagccgtcagtttcgattcttcacaccatttagacgcaattcaattttgcgtatttacactatgttttcagtttggctcagatgtttgaagtaagtcaagagtaagaagtgttgtcaacttcagatccataggccagcttagcttgttttcaagatgaaggactgataacattgtaaagaaacagagaaaatactgcttttcttagccaagaacagagtaagctttgtatggttttactttttatagtctactcggcttttctgttcttaaaagttgcctggttatagtagtttaaaacactctttgggactttatccattgaacttcaatgttctctgaaacaaatattgaagtgttttgcatttgattttgaggaaaggtttattttccttttgaaaataatcaaactctttaagttgttcctaaccatagtcacttttacttgaaggatgcattatagtcttgagcattttttcacttttgtaatcggtatgaccctcttgtgtttttgctgatgagatggtagcagtgctgtggtattgtttgcaggtcctttcttatcctttatctgtgtctccttcccactgtgttgtgggttggtaaatgcatagttccctccattactttttcatggctgaagggattgtaaatattgttttgcatttctagtttttttagatgtccatagaattccatctttagccatagtgcttttataattttgtaatacctttgactagctggggagggggtatagataacagtttagtttccacatattactcattttgtgcaattttattgtgcttctgatatatgcccagtatgctattaggtgctgtgaaggaaatggaaaaaaaattagtaatttttcctgcctgaagaggtttacgatctaattagagggacaaggctaactaaaaagttagaaaacaatacatggtgaagataatgtgttaagatatgttttaaaagaacaaatttatgagattattatgggtgtatcttaatagaataattataactgataatagctggttctacatttaggtaaaaatgattacttccctatgtcaaggcctgaaatacacaggatgttacattttgaattttaaaacaaatcagtatctcattaaactttatggaacaccatgaaactttcaaaatttagaactttaacctagattactgaatttgcatttgaagacactgaggccagtgacgtcctggagtttcaggtctggctaacagtaccagcatgagaacatagggtaacagcaagttgcttgccgtagttttaggtctggcttacagtaccagcatgagaacatggggtaacagtcaggggcttctgagtagttggccgcaggaggtaaagctagtaagcactgctaacataataaaatgaaaggcattgcacacagaccagtggtctgctatttgaccctttcccttcctcctcttctttttccccattttccttttgctgctcttcttccgccatcatcatcagcatcctgacatttgcatggcttcttacgattttgaaattgttttcatatgtacacatttaccggagcatcacaacagccttgtgaggaaggtcagcattgactctgattgaagatgagaaaacacacctgcaaaccagtgaactaatttacaagagtaaatggagcaggacctcaaacccaaatttcctactccaagcctttcactgtacacactgcctcttagaaggctggttccaccccaaatcctttcccaaactggggaatcaattagaagaacaggtagaaaacaaggagtgaagttgtgttcaaatgcttacaataattacttggcttgtaccttttaaaatactttatagatttacttcttcaataatccttgtagatgtgtgtttagtgtattgttaggaattgtatagcatttacaaaagtctaggctggtttaaaccagtagtttgtggagcttttaaaccctgagagaccagcctctagataggactcttgcagtatgtgggacgttggctgtcctaaatgacctccaaaaaggccttttaaatctactccttgcttccatgtgctttattcatgactaccttttatttcctgggtccaggtactaatacatcttgaattatttttttttttccattttatctttctagttaccttccttctacttcttgctgctgcctcctacacagagccctggctcccacagtaggttaatatgtgtaataatgttcagggagtgtgatgaacatgagctgaaaattttagaccaccgtatggtctgcctatatttttctaatttttttttcctctccaaattcgcgtatgttcctagctaccacagcagtgaagggtagtggaaggaatgtggactttggagcccaaatagtttgggctgaaagaccaatcctttcaggctcaaatgcctcgatatttttggacatccacctttaacctgtaaaatgagggtagctgcctgccatgtggtatcatgcgcctgtccctttacctgtcaacttgacatctctaccagatggtgtttttttttttttttttttttttttttttttgagaccgtgtctctctgttgcccaggctggggcgcggtggctcaatctcggctcactgcaacctctgcctcctgggttcaaacagttctcctgcctcagcctcccaagtagtggtggcgtgcgccaccacgaccagctaatttttgtatttttagtagagacggggtttcaccatgttggccaggatggtctcggtctcttgacctcgttgtccgcctgcctcagcctcccaaagtgctgggattacaggtgtgagctactgtgcccggccatctctaccagatgttttaaagacacctcacatccctcctgtccagtaccaaccccagtatctcaccactcagtctctccctccagtcccttggcctacccttgacatgttcattgttctttaattcctttaacagtcttctatcacattggacgtttacctctccctcacactttgtgtcttacctgttaccgtcttgccacctctacttcctacatttctctgtaacccatccatgtctttccacctctaatgtcatcatattcaaattattgccatctcgcacctgggtcattacttctatttttattttttgagacagggtcttactctgtcacccaggctgcagtgcagtggcatgatcatagctcactgcaggctggaactcctgggttcaagcgatcttcctaccacaacctcttcaatggtggggactatataggtgtgcaccatcatacctggctaatgttttaatttttgtagagacagggtctccttatgttgtccaagctggtattgaactcctgggctcaagtgagcctccttcctggcctaccaaaattctggaattgcaggtgtgagccaccgtgtccagccctgacccattgtatcatcctaactgatacccctgcattcacttggtactctcccgtccattttccacatggcaaccaggatgataattttaaaacacatttaatcatgatatcctcttgcttaaagctctttgattccttccccttgttccattctctcccttatgtagaagctgatgactagttagttccagggtctggaacctgaactctccctcctgctctttagtgtcacttgcttcttgttgtcttcaaggcctggcccttccttggatacttgttctcccctctgtctggaagtgctgcttcttgctctctggagccctccccagccctgccccttaactgccccacctattcgcactggttcatagcagctcattctccagtcttcctcctttgagccccctcgggtgtggggctcctccagagcagcgtttccacccttggagcacgtctctctcacttggtgctgcgatgacttgatttcgcaaaaatcaagcaggacaaaggagatgcttcacatcctagttttctttttcctctaacgtcttttctaattgtgaagtttattttgattattaatgtttcattggaaagaaattatttctcattgattgtataaaaatcaaatgacatgattatgttatggccaggttttccccctccagatgaaagtccaggggagaatggtattaaaagtaaataaatttacttaactctcaagtcaagatttatgaatcattgactcaaaagaatgaagtatattatatttgtacaagacagtcttccacagatgcacggtttcatagtggaactgcatttaaaaatcacctgagctgcctctctggctctctgtggcatcatgtggtacttcttattcattgcgacatgggattcctgcccaaaccattaattaaacattttgactttccctttaaaattctgttagcatttagtagctttaatttagttttaaatgctgtttatacttcctgcttattatcttttggtaattaaaacttttcctattcatcatcaaaaagtctgtatttttaaaacccatattttaaaactcaatttaaaacctattttcaaacaatttctctctgttttagattaagtgactaattttctttatattccgtttcactcatgaaaggttttggagagcttcctaaaaggtacgatatgcatatgaaaactgttcctgtgctcttactcttctgatctgctttcaccttttatggctttctttaatgccagtgacttgaacattacacaggattccatcacccacagctgtttgctgtttatacatagacaatatttttcagttgccgttaccgctcctggtcgcatctaacactaccagggctatgtcttcagcaaaaggtgagtggtagttccagtacttcttttcctttaaccagacattactttttcctagattattatgccattgttctcattgtaatctatttctacatttctgccgaatgatacaacttagtgaaatcttctaataccttattaccaaaaagtttggggtcatataggactttatcattattttgtttcagaatacatatgtgttttctacctatgccattgttttttgattctgttaatggtggatttattttatatgttgaaatttagtatttttatatagttaattttgtcagtcactttgtagtgaacttttccaacctcgaattttttcctctgtaaccgttcactgaggctggagtttggtttggatgacctcatccccaggcccagcgattgaccctagtcatacacccagcaaggtggctgactgggaactcaggcctaatctaactagcgggtggtattcgtgactattaagagatgggtgtataactagggcttttggcagtaagtggggaaagaggaactcctctaactggtgaggcatgcaggcctaaggacggagactctgtaggcgtgagggaagccatatggctgaagaagctagcatgtgcaagaagagggcagatttgagagaatggcagagaaatggaacaagactgatcaaatgagtctgattgtgaccttcctctgtactttggaattacatgagccattaaagtacttccttgtttaagctagttgagatttcctatttgtagcttgaaatatcctaacacttcatttttgctttatggttttctccttttttttttttttttttttttttgagccagagtcttgctctgtcgctcaggctggagtgcagcggcgcgatcttggctcagtgcagtctccatctcctggcttcaagccattctcctgcctcagcctcctgagtagctgggattacaggcgtgcgccaccacacctggtgaatttttgtatttttagtagagatggggtttcaccttgttggccaggctggtcttgaactcccgacctcaggtgatccactttggcctcccaaagtgttgggattacacgtgtgagccaccctgctcggcctatggttttgtttctttcttttttctttttttttttttaagagatgggggtctcactctgtccaccaggctggagtgcagtggtgcagtcatagctcgctgcaacctcaaactcttgggcttaagggattctcctgcctcagcctccttagtagctgggacttcagcacacactaccacacccagctaatttttaatttttttgtggagatagagtcccactatgttgttcaggcttgtcccgaacctctagcttaaagtgaacctcccacctcagactcccaaagcacagggattacaggtgtgaggtaccacacctggcctgctttatggttttttatatataaaacgtatcatgagaagttggatggaaattttatctgtatttcctcttactgatttgttcgtttcacaggtgtttgaatccttacatacagtgttttgtcctatggtgtgtgttagagatctgcctttactttttttcctaaacagtttcccatatgtattgaattatatccttcctattgatttgcaacatactccttaggaaactttaggctgttggtgaattttctgttttgttccactaatctgtctttaaatcactgtatcagtaaaaaattataaagtattatccttttgtaatatattttaatgttttcagggaaaatatccctcattattttcctgaagtttcatggccattacctcccctttattctttgggattaatttgggagttattttatgttttatgaaataacttcttggagttttgattagaagtttataaattttataaatgatgagagtgttgacttattttttgagatagattcactccatcccttttaatgtattttaggcataatatattattagtgctcttataaatgagagcttcattttcttatttttcaatttggggaaaatttttgagaacataactatggtaattattagaaaaataacctaggagtatcatatttacatattctctttaaatatattcaactttaaaaataactttatttttaaagttgcatattcagttatcacaaattttatgtgtatctataagtctttttgcatttgtgtgggcctttttctttgttcttgatcaatgttgctggaggtttattgattttattagactttccaaagaatcaaaggttttattgaattattgaatctttatttatttttgctcttttattatttccttgattctacctgattcatgtttatactgtcgttcctttcctaattgttaaatttgttgaatttgatgcttagcttgtttattttcagcctatattcttttatcatttgaacatttaaatgtgtacgtttttttctaatcacttgctgcttagttccaatatatggtgtttttattatttttcatgtatactttagctttatgatttcttctttaatcagtggattatttagaaatgtgtttttatgtgaaaaatgtcataatgttttttgaaatactgatttctaacttgattgcattgtgcttagaggacttgaggtgtattaaactgattgtttagaacttgttgagactgacttcatggtccagtatgtggtcacttttcataaatgtttcacatttgcataagcatatctattgttcaggctgggtgtggcagctcacacctgttgtaatcctagcactttgggaggctgaggagggcggatcacttgaggtcaggagttcgagaccatcctggccaacgtggcaaaaccccgtctctaccaaaaacataaaaattagccaggcctggtggtgtgtgcctgtagtcccagctacttgggaggctgaggcaggagaatcgattgaacccgggaggtagaggttgcagtgagccgatattgtgccactgcactccagcctgggtgacagggtgagactgtgtctcaaaaaaaaaaaaaaaaaaaaaaagaatatctattgtccaattggtggatacagggctctaaaaatatctgttaatcatattgtctaaattgtcaatatatttaatgattgtttttgctctgattagcaattagtgagatatgttaaaattacttcactaaggccaggcatggtggctcacgcctgtaatcccagcactttgggaggtcgaggtggggggatcatgaggtcaggagttcgagaccagcctgggcaacatagtgaaaccctatttctactaaaaatacaaaatttagctgggcatggtggcgtgtgcatgtagtcctagctactcaggaagttgaggcaggagaattgcttgaaactgggaggcagaggttgaagtgagccaagatcgtgccactgcactctggcttgggcatcagagcgagagtccatctcaaaaaaaaaaaaaaattttttttttcattaaatgagagacctctaattttctcctagttctttcaattttttctttatatgctttgaagctatgttattaggtactgtgataggcagaataatgccccctcacctgtccacgcccaaagtaaagatgtctacatcccaatcgtcagaacctgtgaatatgtccctttacatggcaaaggggaattaagatagcagaaggaattaagcttgctgatcatttcgttttcaaatacagagctaatcttggattatccaggtgggtccagtataatcacaagtccttaatgtgaaagaagtaggcagaagaagagtggtgtgacatgagaaggattcagcaggtcattgctggctgtgaagatggaagggggcgtgaaagctagcggtatcaacacagagtggctcatgtgaaaacctaaggaaatggagccgcgaggccatgaagaaggcgccctcgtgcacatatgctcatgtaggaactactggaagaacttccgtgttccggataagctgcctgcctcctgcacatacgctcatgtaggaactactggaagaacttccgtgttccagataagctgcctgcctcgtgcacatacgctcatgtaggaactaccggaagaacttcggtgttcccgataagctgcctgcccatggacacttgcctccttccagctcctgcaaccagagagctttgtctcaagacagctcatgtggacttctcattttttccttttaaaagcttctcttgtctcagcctgtttggatatacctatgggtctgccatagcgtgcatatggattgtagtcccctgctattcctgaataaactgttttggaaagccagtctctcgtttattttacgttgacaggggctatgagtcaaaggatgcagggagcctctagaagcttgaacaggtgaggaaatggattcatctctagagcttctggaaagaaaggcagctttgttggttgtagccagtgacgctggcatcggacttccagttagtgtttctctggtacatctttcttccttcttttaaccttctttctgttggtatccttgtgttttaagtgtgtctctggtaagcattatgtatgtgcattatgtatatagattttgaattttttacctattctgacaatacttgttttaaatcagagaatttcaaagagttatacttactatgattactaatacatttggaattatttgaattatttttaccattttattttgtcctttcactttttaaaactattttacttaaaaaattttaagaggcaatttaaaaagttgttttttgggcaataatcctttacagtaggtatttttattccactttgcagctgagaaaactaagacacagagggttaagtaacttgttcaagatcacacaattagtgtgtggcagaagctggacttgaactctgttcatctgactgtagtgactgcatatcatcctggtacagtttcgtttattgagtgtgatagatttaaaaaaggcagaattgtcagtcaaggatgtgccgatgtcttcgatgtactcctctagatatgccctctacacgctgttctgtgctcccagagtctgacctctttggactgttagtgagcctcctgcctggtggctaccaactgggtccagccagtgagaaacgagggcaaagaattaggtccaggtatttattctgacccttgaaccacccttccttcccacatacaagcccttcctgtgtacagggttacctcagggctcactgtgtcccttgggaaaggtcacggctcgtgtcagggaccctgtccactctgtcctctcagcatctagtttctgcttccctgctcttatgccttaaggcctaggggtgcaaacagcagttgtcatttgctccagggcatggcattatttggttttactaaactgtcctaccttttgtgaaattccctttattaaatgctttccaaattatccctgttgattgcacagtctgttttctgccaggactctgactgatacagtgagaaaggaatgcttaatcaaatcagccgtcctttatggaaataaattattaaagccctgcctcacatcaaaaagcaaagcttgaaaaaaatataataagggattaataatcaaaacatataaaaatgtcaaacatctattaaagaaaaaaggcaagccatgcaaaagtaaagttcagggacatatcctaccagacattgtaaagctataggaataaaatagggtaatactggtgtgtaaaaaacacatagttttacagtctattcatcgatcagataccttaaactacctacctactaacaacaattaaaaatattagaggagagatgtaaaaaactattgaaaatgtatttctgaccaggcaagagaagacggaattggcagggtgaaaaagggcaagccagactctagggagggcagcgagctcttagactgccttcaccgtctttctgaactcaagggccgggagtgtctgctttgatggctgcatgggactccggagataggcaataaagcccatggtttctacaaagtgggaagctccaagatttattgctgaataaatctggaaccctaaagtccgtaatgtaaaaggtgaatgagaaagaaatctctgcgcagaagagagaaggaaacaagccttaactcactggagtagcaaggaaagcgcttctctgagaattgatgaccaccagagggcctcccacaggtcttccctgcacattcctgctatcctactggggaggtccaaaacaacctccagcaaacaattcaacgtggtcttcaagtagttgtgtacccaggcaactggcaaaaacaaatacaactcctctctggaggaaagcagcttccacccaatattcaaggcattactgaaggcaacaaaacaggaaaacaggtaaaggattctcaggcaactcacaggacataaaatgtacatcttgattacgaaataatctgtgtaataagcttagaaaattgcctgacacgtaataagtgctaagtaaacgttagctatgatgatgctggtgacaacaatgatgatttcaagtctttttaattctctcctattaattgatttctcttgctttgttaaaatcacaccagtttaattaacacttgtcatattgtaaactttttaaaatgttcaaattttttcattgttctttttagaagttttcttacatattttatgtgagttttaggattggcttgtcaagttcctgaaaaatcatgtttgaattttgatgaggataggggttacctttatagattactttgttaaaaactgacatctttacagtattgagtcctagcatttctgaatagagtatatcttttagtttattcaggcttcttttatgtcctttagtcaagttttatagttgtcttcataaagatcttgccacctttttttagttttatacccacttttccatttatgttgctctttcctattaaatgcttaaattggctatattgaagatgtaagaaggctgttgagttttgtgttcaccttgtatgttttgcgcttgccaaaatcccttactttttctgattgcctctgattttctaggtgaataatcatattgtttgtaaattgtgataatcatttccttgtgaatatttctgtctctaaatttttatcttattgcaatccctgcaccactacaatgcgggattttaacaagtggaacagatatccttgttttcttcttcattttaatggatgcttctaatattttaccattaaatgtaatattttctctaaatttttgatatataccttttatcagaatttgctaagcatttttgttaggaatgggtgttcagtactattagatgatatttatttcagtctctgatagttacatgatgtttctcctttaatacatgactatagtaaattcattggaacatttcttttttctcctctttatcattaaaatgtttatatatacgttggataagctctacatggccataatacttgtctaacattttaaaatttatttttagtttttaactaatacataatagttggacatatttatggggtacatgtgatattttgatatacgcatatgatgtgtaataaatcagggtaattgggatatctgtcacctcaaacatttatcatttctgtgtgttggggatactccaaatattctcttgcagctatttaagaaatgccttacttcagtatatgtgaggggttgattccagggtcccctgtataaccaaaatcgaagcatgctccagtccacaggtggccctgccaaacccacggatacaaaatttcaccttctgtatccatgaattcacatccctccaatactgtacagttttgtaggatttgaactgcatgggtccatgtatacacacattttttttcaaccaaacatagatcgaaaatacatattcactggatgcgaaacctacatatatgggggctgacttgttgaatatgaggttccacaaggccgacttcgggacatgagtgtgtgaggatttcggtaaacatgagggtcctggaactagttccccatgtagaccgaggaacggctatattttcagtttggttggaaaaatatccttgtataagtggatcctggcagttcaaaccagagttgttcaaggattaactgtacaatagttaactatggtctcctgccagtgctgttgaacactagaacttattcctttcctctaactgtggttttgtatccataaccaacctcgcctcacactttcctctcccctgcccttcctagcctctgggaaacactgttgcactcactacctccacaagatcggttttttttagctcccacataggagtgagaacatgggatatttgtctttctgggcctgactttcgcttaatgtcctccagttataaacgtgttgctgcaaatgacagcatttcattttttcagtggctgaatagtattcctttgtggaagcataacatattttgtttgttcattcatctgttgatgagcatttagcttgattccatatcttggctattgtgaatggagctgtagtaaacgtgggactgcaggtcatctgtttgatagactaatttcctttcttttgggtatatacccagcagcggaattgctagatcatatggcagttctattttccatttctggaggaccctccatactgttttccataatagttctgccaatttacattctcaccaagaccgtatgaacattctttttctctgcatcctagccagcatttgttattttctgtctttttgataatagctatcatatctggggtgagatgaaatctcactgtggttttgatttgcgtttcttaatgactagtgatattgagcattttttccctagacgtggtggccatttgcaggtcttcttttgagaaatgtctcttcagatactttgcccatttaaaaatcagattatttgcttatttgcgattgagttgtttgagttcagtgctgggttccaccgtggcagggctaacacctagttccaatgccaagtcccacactcactttgctttccctaccccaagcataggtgttttccctccaggctgtgctgcctggggatgaggtaccagggtgtaggtaatgtgagactgtcttccctacccctttaaatgcatcttttcttgttaagctaaaaccaggtcctgtcatctcccatctgatttttagctgttatgaaaatgctttcttgtatggatagttgttcattttgatgtttgtgctgaggggatgatctttggagggttttttttttttttttttttttgagccatcttgctccacctttctctctggtaatttttaaactttatttaaaaatgttccatctatattcataagtgctattcccacgtaagtgtgttttcttattatatttatgaatccaactatggtggctttctaaaacatcttaggtttttaaaaaatcttattctttgtcccgttaggacagtttatataatattggttttatctattttttgaagatttgaaaaactcttcattaaaaccatctatgcctagtgcttttaggacactattaggacagtttatataatattggacagtttatataatattggttttatctattttttgaagatctgaaaaactcttcattaaaatcatctatgcttagtgcttttttcccccctgagttaaattattacctgtaattttgatttcttctatggttatttggtcttttgttttcttttttcttatgaaaattttagaacattcttctagtatctgttttgcttagcttttaatgttaattaaaattatatggagttaaattttaaatctttaatatctgaggttgttttcttttccatttctattgtactttatttggatcttctttcttttttcttagttagacttggcaaaacttagccagttttatgggtcatttcaaagaacctgggtttcaaatgtgctggtatttttgtttggttttctaattcatttctttttttatgtctaataatttattctactttcctgtttggttttgtttttacccccctaattttgtaagttataaactaagtttacttattttcaatctcttgtgttttctggtaaatgcattttatgctatgattttttctgaccctgctgtggctgtttcccagtctttattttgtgcgctttatttgttatgtatgtatgatgaaaatggaaatttttcttcagtttttttttcttcatcccaaagcacaagtaaggcgttaaatttcaataggtagatagatgtagagatagtagatttttagccacgttttaattttatcctattacatttattttaaaagatttggaagacttgtatttttttaatttgtaaatatatccttttgtcctaaaacttagataatttttgtgaacattccacatgtttgataagagggtgcattactctctgcctctcttaactgtcttattctctaccagtttatcttatataaatattaaaactattattacatgtgtaaaggttatatttgctttgctaagattgtattagctatctttttatggtctggaacagaggttggcaattttttcttgtaatgggccggatggcttctgtcaaaaccactcagctcgccattgtgttgtgaaagtcgccttacacaatatgtaaatgcaagtgcagctctgttccaataaaattttatttacaaaaacatgtggcaggctagaattggcccactggtcttagtgtgccagctcctggtcagcataagccttatgacactctgaaatttagatattaagtttatgtaatatcgtatatgtctgttaaccttttgggtagtaatttgttgaaaaacatacaactttacccattattttggtatttctggtattctcccttttgaatcactatggaaaatccttatttttctaaaccatcgtacttaacattaatgcttgtattctcaacaagcacaatattgtgaaaattggtttgggtcaggaggaggaaaaaaaaatcttagaaattgcaatggctgtgcatggtggctcattctggtaatcccagcactttaggaggccaaggtaaacagatcacctgagcccaggagttcgagaccagcttgggcaacgtggtgaagccctgttactacaaaacaaacaaacaaacacccaaaaaattagccaggcatggtagcttgcacctgtagtcccagctattcggaagactgaggtgggaggatcagttgatcccaggaaattgaggctgcagtgagctgtgatcatgcccctgcattgcagcctgggcaacagagcaagaccccatctcaaaaaaaaaaaaaaaaaaaaaagaaaaggaattacagtgtcttgtggctctccaaagctcagcccaacaaaatcataccttagcatttatttacaagcggagggtgttgagcaaggcaggttcctttgggggttgataatgaaaaataggtaaggtattcaagtttattaatgtaatgctcttttaagtgtttgtagcatctgtgtctgtggtattgttgctacacattttgcttactcctacttttgcaatttgtattttctgtaattcttattagactagaggcttgtttcccccacacctttcaaagaagtctcttggtctaatttttcagttcaactcttgtgcagattcatctctttaccttttatctttactttgccattgctgtgtgttttccgatgcctttaattgaatgactaatttgttttctgcctcccgttccctctgccactcctcctccccaattttatgctgtgtcttttcctctaattataaatctgggtttatttgcttttttcttttcttttctgtgctttctctttctttaacttctttttttgatatgcagcgtccttactgtcgttattttctaaagattttgtaattgcttgtttggcttctttgagacacgatttaatattagtggaggatttttaaaacatttcccttctttagctatttttggtttgtatttttgtcctgaatttcagtttttattgcattatcttcagaggctgtgatccttataattaatcttcttttgacttgaggcttagtttgtggcaacatatgtcatcaagttttctaagtcttccatgatcacaaaatgatagttgaagtcccttacaatgctcatcagctaggatgctttcagcttcaggtaatgaaaaaccaactgaaaatggcttgaatagaaagaacatttattatctacataagaagtcctggagtagggtaattttagaggttgttaactgggggcctcagtagcatcatcaaaaacctacattcaattcttccctactcaatctgacagcttggacttgtctcataggctggctgtcctcagggtctcaggatgacactcacatgagaggttgcatgtcccctttctagcacttctctctttcccttcattcctccctccgtgtgtgtgtgtgtgtgtgtgtgtgtgtgtgtcattcacagaagtttctcttagatccacagctctttcaatgagtggaatggtgttacatgtccattcttaaaccagtcgttgggaatgatatcaccaggggtagtagagtgcaatgttgattcatggcttgagggccagtccaggctagcgatacagagtgggtaatattctctccctgcagacatagcccctggacccaagtgaacagaatcagagttctcactgaatttaaggctaggggtgggtgcaggcaggtacagggaaggcagttaggcaggcaccagtagtatcatctgcacagttgaatactttattagccataacaatgtgcaaacaatccacacacttcatttgggatatttattccttcaggtgtaacttaagcatcttttttgactctaaacaattgagcgtattgtggaaattttccggtgatttttgtcttaaataagtaattgctgcagcgctgaaaattattactataaaattctactcctgttagtatatcagatatatatatttttaccattttctttataattcagaattttaggattttgagcagccagacattgtgttgtctttattgttcttccagcactgagtgctgaatttccagaaacgaatggtaataatgaaaggtgcatatctggagatagatggaagtgtaactcaagatgtgattagctacccagtttgtttttattaaaatgttatttttttctgcatatttgtaattcagggaaagtttctaatgtgaaaaataaagtagcttttcttaaggcaacgtataaaaaataattggtttaacagcattgtgtgaatacagatgagatggtcctattaaaatttgatcacaaagtatacatggtaaatgcagcaagattcatgctaactaattactatttcaagtttggagtaaaatgctgaattatgggatgctgtaatgtcactaatgagtcctgtcatggagaaatgatattgccaattacacataaaatagtcaaaggctaatacatttggagaattgtcaagatgggtttttttttcccctcgtgcttactggttatgtgtttgcatttttgttgagagaatacacagaaatgatctactgtcacttgctttcaagctggaattattctcttcatatttaggcgtaggtaccaattaagtgaaaagaaatctgtcttaagtgaaactatggactactagtatagtgtatcttgtagctgtttaatgttgtaactgctaggttctttactttgcatccaggtaatgtaatgtgaatgatggattattaagttcttttcataggaaataggcatattttaagttaatagtccttatcactgataccaattagccgaagagaaatgaattccctggatttacatttcttaatagttctttcaggattgctttgttacttttgaggaaggtgtatgaaatttggcctaggcactgtatccggtgtgaaataaatttatgcattcaataagtatttattgagtgcctgtgatatgccagtcattcctgtgttctgtatatcattttaaagattaccattcgttttcttctgatatttctttaaacatcttattttttgtgtcaagaacttaccatatagaattctgtgacttcccgccacttccatttagctttatatcaaggatagaattcagtatgaacacatgaagacctgcatgcttaaacagactaattgaaatggttgaatgggtaagaaaatgctcccttgaatccacatccttaaatgaggccaggcagacttggaggggtctgtgagcccctgagctcctgtcttacagtctcaggctattggagggggctgcacatcccacatttgggtagatgcccaaattctccttttagtatatactctcccttttcttgggtgttcttggaactctggtagaagacagggagaatgatagattttccttgccctccacagacacaggcaaactagtttctgttaggcattcactctgtgtaacattcatcccaattgcaatggtgatacagctaccgtcaacagactgatcaccttgcctgtgccatgtgccctgtgcacatttactctagtcttcacagtaacctccagagaggtgttatcccattttatagattacagccgaaaaaggttaaggaccttgtcactgaactgcccagtagaagttcaagcatatgctcatggaatttgattttacggaagtatgtaccctttagggatctacagttaggtgccctctagggtgtctagaattgctgaggagcccatcgttccttaagcacctgtgctgcgttgtattgtaatcacctgagggtgctttaaagactatgaataatactcagactttcttctccaaccatttacatcagagcatctgggggtggaacccaggcatcagtattttgcaaagttcccaaacgatgtcagtgtttagccaaatatgagacccactggtttagagctgtaaacagtgcagttgctactgttttatggtagatgttacagaaatatgtcgttgaattgcctataaaatgaattaaagattggagcatttctttttcccctattcataaaccattgtgatcgcagtcttctatagaaattacctattttgcctgatgagatttacttagaaagggaaataaacacatagctatatctctcctgaagtcttcttgcagttactaattaaggcagtacacacattctcagttgagctagaactttagctattgtctctttgctctactgaaggtaacccgagtgttacggctttttaaatgagctggaacaataaatacaaatttcgttggcaagacaaatactttttctcatatgccaacgattatgtaatcaaagtataaagtatccatataaagccttgcttttgaaaataatttcaatttaaaaattaaaaatagtaattaacattggtaacagtatattgatgaccactgtttagctgatacagtgaatacaggtgttcatataaaacatcatttaaaatcgtctatccatatggaacacattacgttttcttccaatttacattgacttcctgttggtttctgaatacaactcaaggtgttaatttcgttttcaaagccagatgttatttggcaggataaaacttaaatttcccctaatagatatttttaggcacttaggatgctagggaacttagtaagtgctttttaaaatctagagcattttcaaaatgctcctttctgttcagtctttcttctctgctaaaattgttatgtgctaggggagatttgtgaattttagagtaatatctttaagaagcctgacagagtagatcgagaccatcctggctaacacggtgaaaccccgtctctactaaaaatagaaaaaattagccaggcatggtggcaggcacctgtagtcccagctactcaggaggctgaggcaggagaatggcgtgaaccggcaaggtggagcttgcggtgagccgagatcacgccaccacactccaacctgggcgacagagcgagactccgtctcaaaaaaatacaaaaacaaaaacaacaaaaaaacctgacggatgtcagtgaaattgggggatactaaataaagagtggacagcagtggcggggcaacaagcagttcttcagtgttcctgttcctcagcgtagccaacttggtcctgtatctccacagttcacaggtaacaagtgccctgttgcttcctggttgactgatgctctctctgttacataacatccctgacaacctgttaagtttgtaattattgaacaaagtcccacctcattggcaataatggcaaacagaacgatgcagctgtttagcttgctcttgattgaacagaggacataagttggctgttagttgactaatgactaaaattttgataaagataagaaaacactaggcatttgagattcatgtaataagtagcttatgcatgtactgtattcaaagagaagatttattttatttttttatttttctattttttgagacggagtcttgctctctcgcccaggctggagtgcagtggcgtgatctctgctcactgcaaggtctgcctcccgggttcacaccattctcctgcctcagcctccccagtagctgggactacaggtgcccgccaccaagcctggctaatttttttgtatttttactagagacggagtttcaccgtgttagccaggatggtctcgatctcctgacctcataatcctcacacctcggcctcccaaagtactgagattacaggcgtcaaccaccatgcctggctgaagagaagatttagatatatgtctgtctgtccatccatctccctacccttcatctaactgtccattcaggacatttcttcacagctaaactctacctcagtttttaatctttaagtccagagctcagtccattgatttactgtattcatcagattttaatggatgcttatagttttgttctcaaagaaaattaaaaatattacttctagtgtggtgtgctgttctcactgcagagtactgtttgttttgtttttaatttacatatatttactaggaagtgcccacactgataaaacagtcagtagtaatcaagaaatgtgactttcttgcactattatttaactaaaggaaagcagaattatagaaaagaatgttaggaatgttatcttcatgagtcagggcttttgcaatgctaggccttctcactttcaatttctctcttgcaaggttaaaagaattattcttgtgttaactcacaattactgcatttgatcatcctttctcacttatgacatagcttctatgacttatggaacattggatttgctatagtagaccagtctgaatctgtctctacatggaatgaccagattgaattggcaccaaagttccactacaaatccttcatccagtcttccagtttgaattggaaatatcaattcaagcagctcacaagtcatcaaatgtttcagtggttttgtatagccagaacaggcagaagaatatgttcctgtatagacagttcattgaaacagtttattctgtattatacctaggtgagttttgaaaagtcagattttttttttaaggtaaactctgatctcatttatttagaagtcagacatgttccaagaacctagaggaaagcaaagtgaaacctccctcctccccactgccccaacattcaaaatagctattataaagccattttttatttcattaggaaaacttttaggagcttttattttgagtcagtgtttctattttatatatagttttaataacttttgttattttaatccagattaaagatagcaatttagagatgggtagagcaggtcattagaaatgatacgggtatcctacctggaacagagtgaagaaattttagtcttgggacatttagggtggtggcaaataactctgcagtgtaacagcgcttgaatacaatgatgacttgtaagggtatcaacattatgggaagacagtgttagaaattacagatttgtgaaagaattttttttgttttcattttctgagaaatagatatggggtgcacagtgatgttatgtatgaagtgtgggatgattgaattagctcattaacatattcatcaccttaagtacttagcatttattgttcctgtctaactgcaactaccaacccttcctcatctcccaacaattatgttttatatactctgttaaagaagtcagagaatatattgggaaaacactgaagtggttccaattttaacattgtgtttgagagcaaatgtttgttaagttttggctaattaggtcacctcattggttgattatgctgtgtaactgagggatttctacacacggtttatttgttaaaaacttaatgtgtataagaagtgatgtgaggatttctttacacttctgctcccatggtttcaaatgtgtctccttctctctatctgcaaccatgacctccctcttgagttacaagccattatttcttatgggttaacagttagtgcagctgttatctcctgtcagaaccataaacctggtgttgattccttcatctaatttcttcaatttgtctctctaaagtgctgttactctggggtattccctgtcttggttgatgacagatgccaccatccgtcagtctctgaagcttgaaactgcagtgtaacagcgcttttcttagttgcacatcctcctgatcatgcattgtcatgaatccctcagaactgtcatttcagcgaggcccctttctgttctgagctggaaagcataatggttctttttttttttttttttttttttgaagcggagtctcgctctgccacccaggctggagtgcagtgttgcaatctcggctcattgcagcctctgcctctcaggctcaggtgattctcctgcctcagcctcctgagtagctgggattacagcctgtgtgacgccacactggagtaatttttgtatttttagtagagatgaagttttgccatgttgcccaggcaagtcttgaacacccagcctcaagagatcctcccgcctcagcctcccaaagtgctgggattacaggcgtgagccactgctctgggctggaaaacttggctctgatgctgtccctgtgttcaggctctttgcaacattgatgaaattactcttcttaaaaacaaaagtaatgatgtcatgcttcccataaagactgtcaccaactactccgtgtggttcctgcgtcagtcttcagtgttagctccctccctgccctctccacatgccacgaggcgagacagcaagtgctcctttgtcctcgtggacccagttctaccacagctctctgcctttgcacgagctggtcccgtggcctgggtgctcctacaaaacgctagagccaggaagagagatgccagcggtctcctgagttaataccgtattctaacgaagatctgtttcacacttttcaaagcttcagttcacagattccagaagaattttgcatacaactagaacatacttatcttttctcagtggcccgtcactataacattaaataagatcttaattgtaaaacacacttaagtgatacactttttcccaggagagagctgataacggtctttaagagcttggaccctggagatgcgtagtgtggtcttgaattcctgctctggtgctgagcagctgtatgcctttaacttctctgtcactgctgcctcctcattgaaatgaggctagcagtgggacctgtctcgtgggatcgctggagggtcagataagttagcatatctgaggctcccaggatagtgtctggtgtggaagcatgtgtatgttttagctgctgttattatcattagtttcaattccctggcaatagcactgtttggagtctcactgtgtattatttaacagattctgaataaagccattttatcttctttttattctttatagatgataaataatgttcctacaactcgaggtatcacgctgtgtttttaactttttttttttttagcattactgaaagaagttgtatgtactttatcttattttgctccctaattataaaatacagggaaaatcatattcttttgcatgaacaaatgagctatttgaaacaggttgcttggtgaaagtgaaaatttaaaacaggattcaggtcaagtataatatattggtttacacttaacagagttcatagtgatttttatatgtctcctttctttttgatgaagaatgtctgtgttccgactactttacttctccgttcattttcatttgttacattctgaaagcataaaacgtgccattggttaatcaatttagtctagtggaggtacacaaattcaaggtaaatttggctaatttctcctgcaggctagaagataaaatcctttccccccaccacagttaggttagtagtgcttgacgtgatcagatgcctcttcagaggtcacctgatttaattgtggttgtgaagcagccaatccaaatccccatattttaatttctatccctccacattctcggcacagaataattaagagtatagtttttgcttatgtcatttatccagtgaaaaatgttcctaataaatacgtgacagttaaaattgttctagagaagaatgtttattaacagacaagacagtgcttattgccacagcatcattttaatctaagacttaactaaaaagagaaactctttttagttagaagaatgctccaacaaggctgttaccactcagcgaaggcaatggttactcttttattttttaaattggtttgcccctaaggtaggcattcccagggctaaaactgtgaaataaaatgtacgcaaggggactggtgcttatagatttgtgtgtataaatgtagtatttgtgggaaatgtcaagctatgtactcttctttaccttttattttctcctagatgatgtttatcagtctttttgtagctgtctgctgcagacatcattgcgtctttattatgaaagtgctatgtgtagctttccagtcattgctattcgagagtgagtttgtgaagcagcaggagagagatgattttgcaaattgcaatataataccatatatgatcttgtctcaacctgtaacacacacatcttcacagaaataacatttaattatggtaatatcctccctgatatcagacacagtatggcgcctgttaagattatattgtttgtagtaagatggagtaaaagaggtttaaaaatgaaagaataaaatcacataccttgataaaccccttagatgctatttaggccatggagagcttttgattttgtttcctttctttcttcccaaaataaaaacgcacacaataatttgacagacaaacactgtcacacactgtaaccccatctaatcccctcactgcacatcttaatccctgatggacttttctcagctatgtgggctatgaggttagggagtttctggatgtgatactttttccaaagtttcccagtgacagatgcagtgaccttatcacggagacagctttatgcagtttgacagttcagccatctggcttgtatcgattataattgatttaaagaaactaacactccaaaagttggccacttaaaaccctaaggctaaattggtctacatttaatttgaagtttcaaaactttattcttaaaactaatttgggcctctttgtaaaattcagccaacttcttttctgtgtggggttttggggtgaaaacactcaaagcctgccttgaaaaaagtcaacttttatgagaactaaagacgacatgtgtactcatagacatagattttatctcttcttagattttgctagagtttaaaacttaggtagacttcggttctaggacttcaaaaagtttagaaacttttaggctagtttctttatttaccagccttctagacgtgagctcattacctgaccttttagagtcttggttttctcatctataaaatgaatgatgatagtagctttctcattgcatttttgggagtattaaatgatacatgttaagtgcttaacacattgcctagtatattgtgggtaataaagatttattttactaatgattactgctacaaattagtagctaccattgatagctattacttcttcctttcttggttttccatctgtcggcttcctcttgttttcctccaatatcacagacacagttgcttagtcttgtatgtgtttcttcagctctctgcatatttgttaccggaatgtctcagaatgttgcctgtaggcctcatcttttttttttttttcccctttactccctccatatacattctcatccacaatcaagacttcagcatgttcttgtatgctgatgagttccacatggtcatttccaactgaagtctcttttttgggctcatctgaaaggcatttcttatcctgctacatgacactttaggggacccagtgggcataagggcaagtaagcatcaatttgggaatgaatactattgatctggcactaacttttattggttgattggtaagaatttgcagaaatctaaagtttaattaaaattttgttttatactttgtgttttaaaatctgatgttgcatatcacactgtaatacaaatgcattcagtaaagtgtgccctttctacaactcttgattttaatgtagttactggaattatttgtttggaaaaacctggctttctgaatagctgaaattttacgcatttcagcaataatggtgtccttaagatcgacatctttccggattcattttttgtattgatttaattcaacaatcatttgtgcaacagtaacttgcttacaatgccttctcaggcactaacttgctatattaaaatagaatttattaactgaccattccttaatgacttagccattttttgtgtgttttttttaattgtcagatgtatgccacataaagaaaagtattaaaaatgtgtagtatggtgtaaagaatagcaaagttgagctccaaactacccaacttcaggttaacaacattgccagtgtcttagaagccccatgtgttcctctctcattgtttccgtctctctcagcctcagaggtaaacacgtcaggtttgctagctcttctttatggactaaccaccccattgttgttttgcataaagcagtgtattgttgttttaaaaatggagtaacttgtatacccatcgctgtgtaagggcacggcagtgttgccactgcaggctactataagaagagaaacggagctgagtctgggtcatagccgggcctgtttttccctggagtttaccaaagccccttctgtggaagttagtggccaagggcaagaatgggtcctgggaaacacagggcttagcatagtccgaacaactaacagggctgttttgagggtcatgtgtcacatgtctgacagaagtatgtttgtaagttcactatgagtagatcaaagtgggccattatagggtgaaaggaatgtcctcagctgatagtgacatcaaggcagggctgggaattgacggagatagagtgggaactccattaacaggtgattaggacaagtagccataggagtcctggtcaggctcactggggtgtcttgtcttcaggttaaaaaggtggttgggtgggtgagtggggtttagggggggtctggtgacagccctcaacttgtctatcgagtcacattgccgaaatgtgggcctattctctctatatctgttgtttagctctgatcctgtgatcacatttctctgtgttttgaggattccatttgcttcttatttgtactgagtctcctttcttatatcccctattttctccttcttggactactcttgtgttagtggaacatgtcatctggtatcttaaaacgtcatgagaaatgcattctttgagatcttgtaaattcaaaaatgtagacattttttctaccctctttcttagatttactgggtagagaattcttggtgggaaataattttcctcacttatttgaaagtattgctccattgacttcttgcttccagtgttgctgttgagaagttaagagtcattctgctttctcattattcttatgtgatcttgctgtttttctctgattatttgtaagaatttctgttttctccagtgttttgaaatttcacaatgatacagctaattgtagatctcattttcctttgtgctcggtactcagtggattctttaaacttggaaacaaatttcttttatttctaagaaggcttctagagtcatttcattaatgacttcatcctttaattttttcctctcctttctttctaagactcctgtttggaagttttgcctcctatactagtcctctgtttttcatgttttttttcattttttattttttgacattttactttctgggagatttcattttccaactgatattattttcttctatcatgttaattattaagaattctttttcttcttgcagcatcctattcttatttaatagatgaagcattttttaatatctgataattttaatgatagattttttgaagttttctctgcatactttcttctttattactgttttgatttctaacttctctgttaaaggcttttcttagatgactgttcattgtatatgtgcttataatgcaaagtggcagactaaaacattgaaagtcttgagcatgcagattaaagatctgggcatattatttcattgcagggtgatctgcttgagctcttttcttggggtaacttttgtcagtatcttttcttagtatctttagagaattcctcttggactgattagattccttagggaagactccttcagttttctgcttggctattaactgtttttactattcttccctctgttttctccaacttgctctttccaacttgctatgggctagggaatcaggaaaaagaaaaaaaaaaactgatcaggacagtttcaaagtagaacagttaggttccgagtgacagcctaagggattggcctgtgcgtaaaatgctttaatgtgtggaatttatgacattgattttgatgacccaggagcatgtttttatttcgtgctcctgattatattgtggaaaggtgatttagtcatacaacagaattctaagtagatgaagtattaatgcaaactgttatagagtatttgtttttcttaatccatttcatttgatccactgtgtgtacttttccagttgattataaattgatttgttcattaatttgttctagttactggtccataattatcataatgtttttattttttgttgaagtatgtgcagtattttggactttttccagttatgatggactatcagtatgttctcacaagtaatgggacactgtattttacaaatatttattactcttgatgttctctaagattctgtattatgagctcttgttgatttacagacatttggaaatgtaactatttgattcttattcttggttaatgttttatcctcctagaccaaaggtgtttattctttagaactttatatgtttgttttaacagctggatttctagtgataggcaaacttttaacaaaaattccaattacatataagcttactgccatttgatttctataattaaaaatattaatattattagtggggtttagtcagtcactatattagacaaacgtgtgagttagaaattcaggtgtacacaaggattattaattggggcttcttcaaagaattttgacattagtaaaatttttcttttttttcaaaatgtttcaaagatttttttttaattaattaattaatttatttttagacaaagtcttgcttaaagtcttgctcttggccaccaggctggagtgcagtggcagaatctcggctcactgcaacctctgcctcctgggttcaagctattctcttgcctcagcctcccgagtaggtgggattacaggtgcctaccaccatgcctggctaatttttgtattttttgtagagatggggtttccctatgttggccaggctgatcttgaactcctgacctcaggtgatccaccgccttggcctcccaaagtgctgggattacaggcgtgaaccgccattcccagccaggatgatttatttttaatagcacccctaatgtatttaaagcatgattgcacatacaaaatttggatttacatacattttcagaactacccgttttgtgtaagtatacacttatattttttaattttaaaaatattaaaattttgacaattttatgtgttattggggtaccgtttggtattttgctatgtgtttacaatgtggaatgagtatatcaggctaattaacaacacatttcttacacgtgagagggctgttttttagaaatcagcttcagcttttgattttctgaatgaccttgagcaaattgttttcttgttctgtaacatacttttcttggccataaaattgagatgaagatgttaatgctgatctaaccaaatgattttgatattatagggattaatgaactgtttgtaaaatattttgttgttcttggaattacttacactggtgatgttattaatattatgtactatgttcacagtggactaatgatgccattgtattagctaatgttttagattacttttaattaaaattgtatggagacattggtgtgcttgctgcaatcttgtcctcctctgcaaatggcaagggagtattatcacaaaatatttaaattatacataaattcaaggtttttaagaatttgtcaactccctggaagaagaagaagtaagaaattactcattaagactcaggaatctcagcatccctatttggaagaattggattatttggcttatttataaatttcaaaatgatacattttcagctaatgatgattgaatcttgtcagacaccttacacaactgtgaacattccacaagttaagaaaacaacttcaggtggggtgtggtggctcatgcccataatctcaacaagttttgaggccaagcaggaggattgcttgagcccaggagtttgagaccagccgggcaatatagtgagaaccttcctctataaaaagttaaaaaattagccagttgtgatggtgttacttatagtcctagctactcagtaggctgaggtgggaggaacactagagaccaggggtttgaggctgcagtacgctatgaccatgccactgcactccagcctgggtgatagagccagaccttcatatcttaaaaaaacaaaacaaaatgcatttatagtaccattaataagaatgatatacttaagagtaaactttaaaaagttcaagactagtacactgaaaattttaaaatattgttaaatcgaagatgtaagtaaatggaaaggcgtgatgtgtttatggattggaagacttaataatgttaaaatatgtagataaaggcaaggcatggtggctcatgcccgtaatcctagcactttgggaggccgaggtgggcggatcacgaggtcaggagtttgagaccaacttgaccaacatggtgaaaccctgtctctactaaaaatacaaaaattagccgggcatggtggcacgtgcctgtagtctcagctactcgggaggctgaggcaggagaattgcttgaacccgggaggcagaggttgtagtgagccaagatcgcgccattgcactccagcctgggcaacagagcgagactccttctcaaaaaaaaaccaaaaaaattatatatatatatatgtgtgtgtgtgtgtgtgtgtgtgtgtgtgtagataaaacacaattcatatcaaaatcccagctggatgctgctgttgttgtcgttgttgttgttgttgttgttgttgttgcagaatttgaccagctgatcttaaaaccacacagtgataatacaagggacccagaatggccaaacagtattgaaaaagaagatcaaagttggaggactcatattttccaatttcaaacttactttaaagctactataatcaagatgctgtggtactggcataaagaaagacatatatgttggtggaatagaattgagaatctagaaatctttacatttaatagtcaattgattttccagaagaatgctattaagacggttaaactgggtaagaatagtcttgtcagcaaattgtgctgggacaactggatatctacaagaaaagaatgtttagatccctacctcacagcatatgcagaaattaactcaaagtgcattatagctaaaactatgaaactctcagaggaaaacattggagtaaatcttcattaccttgggttaggcagttgtttcttagacattacactaaaagcacaaacaacagaaggaaaaaaaaaaaaccatacttggctggtgggggatgtaaaatggtgcaaccactttggaaaacagcctggcagttcctgaaaatgttaaaatacaattaatatatgacctagcaattctactcctagttatgtacccaagaaaaatgaaaacataaatccctgcaaaaactagtttccaaatgtaatggagataggcagtcagtaaacaaaatatataaaatgcccagtggtgatacaactcctgatgtttcatttcattctttttctatatggtaagcccccttgactattagaaaaattgtacttaaaaaatatagcttgtacatacttcgtcagaataaagtaggaatgttacttttttcataatctcttttaggtcaattgaatattttaaaatatatctgtttttgttttgctaattaaacctatttttttttgatctagggtttacaatacacatctgtaatttattgttcaactgactgagactgggtttcactctgtcacccagtttagagtgcagttgcatgatgagaggtaactgcagcctcaaaccccttggctcaaggaatccaatcctcctgcctctgcctcccaagtagctaggactacaggtgcatgccacatctggccagtttttgaaatctttttgcagggatggggtctcactctgttgcttcagctggtctcaaactcctaggctcaagcaaacctcccacctaggcctcccatagtgctatggtgataggcatgagccactgcacttggcttattgtttatcttaatatatctcttcacataaaatatagtatgcttaaaatagtatatagttggcccttgaaaacatgggtttgaattgcatgggtccacttgtatgctgatttttttcaataaataaactcggccctctatgtctgtgaattctgcatccacaaccaaaagtggctcaaaaatacagtattcctgggatgcaaaacctgtagatgtggagaactgaccttttgagtatgcacattctgcagggacaactgcaggacttgagtatgcttggatttagtagccatgggaggtcctggaaccaatcccctttgaataccaagggaagactgttgcttttatttcttccttcctgccccttgtgcaattactgttatgcattttatatttatttttatgtttgttataagctctacaatacatttttatttttgctttttactgtcagttttctcttaaatttaaaaataagaaaaaaattcatttgtagacacccacatttaccattcatcatattctttatttctttttgtagatgcaagttttcatctgacaacactttctctttgccaaaagaacttcttgtagcttttcttgcagttcacatcttctgacaactagttctctcagattttgtttgcttgaaaaaaattttggtactatttttgaatgacattttcattgtatgtaggattccagggtgatagttttatttattttttcctgaactttgaagatgttcttctattgtcttctggcttatattgtgtctgatgaaaagtcagtaatcactcttacctattccctgtgtaagttgtattttttccctttgtttgcttctatttatcactagttatcaggaattttctttgttattattctcttttgggtttcgtcttttaaatatatggtttcatgctttcataaaatataatttgccaaatttttaacattgtattttcaaatgctttactctcttgactctgatgactctgatgtactttgatgacatgcatattatattatcatattatattgtttgctgttttccctttttactgagagtgtttatttcttacagtcttcctccccctgctccccaaccttcagtttatgtagctgctcttgtgttgtattcagattcactgatcttttcttctcctatatttatatgcatttaactatatccagggagtattccagttcaggtgttgtatttttcaactccagatgtttgattttttcctatactttatttaaatacattacatgtcttgtttttttttttaaataaacacacacatttattcatttgaattccttccttattaattccatcatctctatcattgctatatctgtttatatagtctaatttttctcttggttaagggctgcattttcctttagagggtatttgtttttatttttgtgggaagctaccttacaagtatgtcaacttagtctcttcaagccggggttttgagttttgtttggtgggtgaactgtgtattatcatatggtttgtttagccctaatcccggtacctggtcttctagggtgtctgctgaatgccctaggtgtttactgaagttccagtgggactctaatgtcttcaacactgtgtgtacttcagcatttacccagcttagttctctctagtagttgtcgttttttgtgttgtctcttgaaatctcaccctacacatgtgcagcgtagtattcagacaaaaaccaaggggacctgtatgcggatttctggacctctttctttgtagaactccttctgtttttgtattctcccttcaaattgctctgatctctgtgttgtcatgtaacaagaccattgtgcttttttggggtagccagtacctacagcatggtgcagtaaatgctcggaataatagtctagtgtcaggaaaccattgtttcccatattctgctttctggttgttgactgcaggaaggactgatctagtgctagttactccacagtggctgacagtcccctctgtattattatttaacctgttattttatagtccattaatgcagaaatgtttccatccttgctgtactctcatgtccacaacaaagcctgacacattctaagtggttagtagccatttactgagtgctgtatgcagtagattatctctccctttctcctgcatggtcaaatttttccttcagtgcgggactccctccaattagcattggaatatgtgttagtctccctttgtcttaaaccgccatatctggacctgcccttatctaattcccaacctgcttcagtgttgctttcatccagcagttccattgcaataatattcacaagtgttattgatgactcccctatggtttaaacctatctcggtcttaatctcacttgattcctggtggcatttgacactgctgactgtcctggaatcctcttttcccttactttcctgaccccatattttctacttattttccttctggctgtccctttgtctgtctggcttctgtttctctgaccaggcataaactgctactgatagtcagggtgttgtccattgtccttgttgttctacaaactgttgccttgtaatctcgtaattaccatccagaagctggtgttttctgaatatttttttttctggtttcagattcatgtggacagttggctgttgacttctctgtccctgaagctctcaaaagtatgccccaaattaagctaatcattactctttcctctctgacatcatcattcttcttcttcttcttctttttttttttttttttgagacagaatcttgccctgttgccctggctggagtgcagtggtgtgtgatcttggctcactgtaacctctacctcctcggttcaaacaattctcctgcctcagcctcctgagtagctgggattacagctgcccgccaccatgcctgactaattgttgtatttttagtagagatggggttttaccatgttggccaggctggtctcgaactcctgacctcaaatgatatacccgcctgggcctcccaaagtgttgggattacaggtgtgagccaccccgcccagccttacatcatcattcttgagattgcaatttagatagctctaatttcaagagacctttcctgattcttcaaagtgttctgtaccttttccatcttgacacttcgaaccctagtattgaaattgccttgtagtgcattggcattgccccaaacctgtttatttccctcactaggcgtgaaattctttgaaggcaggaatggctgctatcagtaggtgctcaataagtatttggggatggataaatgaaggaatgaatgatattataggaagtgagtattttattcagtgcaggatttagtttgtttttctgctcttaaaggataaacatatctgcactgttttaatagaatgttctagtaatatctgtggcagtgatggtgggtcatagcaggcaggcagcagttgtgaactcagcatatcagggcagcctaaggaaggtggggtgtgtgtgtgtgtgtgcgtgtgtgtgtgtgtatgtatgtacatgcgtgtgatactcagacacacagacatccatccatcttaaggtgtcagaatattaagtaagattaagttgtgttagacaatggagtcttacacagtgacttgacccccaggataccacttctgttacagatgcttggggaggggtcctctggtttttctgtttgtgctggatttctaatattcatgataggagcttctcaacctaatcctggagccggagctgcttgggtttgaatcccagctctgccaacatgtgacctcaggcaaataccgttacttttctgtgtgtgtttcctcagttgtaagacagggtaatgataatacacaccttcttagaggtaatgtctgtaaagcaattaaagggtgcctggcacgtgataattgctatgtaggggcttattaaatacaaccacaatgtttggggccgttgtgttacctccattttacagttcccaaagtgagacccaaatagctgagtgttacgaagtgtccctccagtagcagagctggtctgtctgtctctgggcccctcttcctcaactgtgcttacctgcatcttcactcaacacttaacctctgtttaatgtcacagggcaggctcagagagcagcagccagacatgggtgttttctaccttcggccctgcagaggatttctgtaagaaaagcagcatgacagagagagccccccaggacatacagaaaatgagtacttagagtctaaattatagagaatggaatgttaagtcagtggttctcagttcagactgcacgttagaatcacctagtgggcttttaaaatatacagatgccagggcttcaccccagactcattaaatgaaggtctccgagtcatgaataacatcggtgggtgggggccaaggactttccagagctccccaggtagttcagatatgcagccatggttgacaaccattgacttagaactgggagggggctcccttattctcttgttcctccagtgtttcctaagcgtcgaccttatcaaaagtaggtctgacagtgtgttcccagtgcctggacctggatattttttacttcagctttaattcaaaccattatgtgctgctagtcactgtggtgtgggagcagcagtgcacaaggtggtgaggaagccagcctgcctcaaggagtttaacatttcctaggaaagcagtgtctgaatacttagatgattctataactgacttgcacagacgttctgctgtcacagtaggtattactgaataatgtggctgctccaagttttttagttatgttccatgtagttgtgagtcactgccaaggcactcggtcttctaaagggtctctgaaaaatcactgacgtgaggcggattaataggcaaaaaggcatgggatttatttaatgtttgtacatgggagccctcagaatgaagacccaaaccccaaatgaggaacagaaacttctgtgcacttttgaggttacagaaagaatacaggctcagagaatggcccaagacaggttttagtggcaagacaagtaatgggagggaagaaggggggaggcttggctagcaaaggtggtcttattatacagatgaaacctcagagatagcagttctcagagagaacagatgatagatgtttcttttcagacgtttaaaggctgcagactctcagtctctcctacatccaagacaggcctggatacgttcatggagattctctgtagatgtaaattaccccaacaaaagatggcattccagaggtgtttctgtctgctggccctgcagccgccatttcaaaatatgtcaaattaaaatattttgatttccttccgtgggaagccatcagaacaagaagagatgagatcaaacagcaaagaattgccctggctgctgtcttgaagagtgtagggggacgagggtgaaaatggaggctgtcacagcagactagacaaatggtgacagtggcttgggccagggtggcaggggcatctttgagagtagagccagcaggattaggattccacggtctgagaaaggaaccaaggacgactccatgttacacttgtttctgctcaccatagtctgtgttaataggtgatttagaatttcatattttccttcttgggtacttacaagataatttagtacttctgaaaacttttctatagttagattatttttgctttctttttagatgcagaataatatctacctatttacgtgtgttgagattttgcatttgatttcagtgctaaagattttagataaagctccaattcaaaaataacctgaattcttggaagtttaaattacttaaagttcaataagttgattatttaggtcattttacttactttagtgctttacattaaaattttcctgtttaatgaacatttaactaattaggaaaatttattagtcaaattgtcagactctgttaaatggcttgtcaaaatgtttgtttagcagttattcctgtcttcttaacattgttgatctttctaaccctctagttcagttttttctgggtgattgtgttaagtggtagtatttaccaattattttaaaaatcctttattatgaaaataagtcactgtggacagttaaagcataaaaagtttaaagaagcaaaaaataagcatacaaaatcaaccattattttaccattcttaggcagccactgttttttttgttttttgtttttttttaactttttagagcaattttaggttcacagcaaaattgagtagctggtacactgatatctcgtatgtctcctgcccctgcacgtgcacagcctcctccatgatcaccatcccccaccggagtggtatgttgcaaccattgatgagcctgtattgacaccaggatcacctgaagtccatactttacattagaattcactcttgatattgtacattctctgggtgtgggtgaatttatgaggtgtgtattcatcatcacagtttcctacagagtcctttcactgcccttaaaatcctctgacctctgcatagttatctcttccctctaacccctggcaaccacacgtcttttaactgtctctgtagttttgccttttgcagaatgtcgtatcattgggatcatacagaatatagacttttcagactgataactttcacatagtaatatttattgtttcctccctgtgttttcatagctcatttgtttgataactcacttgttttcagtgctgagtaatattccattgtgtggctatatcaaagtttatgtattcacctaatgaagaatatcttggttgcttccaagttttcgcaattatgaataaaactggcataaacatctgtgtgcaggtttttgtatgtggaaataagttttccatttctttgggtgaataccaaggagtgtggatcatatggtacgggtatgtttcgttttgtaagaagccaccaggctgtcctcagaagtgactgtaacattttacatccccagcagcaatgactgagaattcccattgctccgcatcctctttaccatttggtgttgtctggattttggccattctagtgatatgttgttgttgatgaagtatctattaaggtctttggctcattttttaattggttgtttgaagcaactacttttaaaggtattatttccttcctgtctttttatttttatgcttttttatgtgagtggttgagatttggggtaaatattccatctgttttttttccatttaacgtcacgatgaaatctttttctgttttgttaaagtgcattatgtcattgtaacaggtatgtaattataatgagatttgacattcacctattcttagaaattttggttctttctacctttgcaaaattataaacaatattgccattgagatgattgtgcctgaaaacctcccctgtgttttgtgttgttttcttagagcatatcctagaagctaagtgactggtttggagaacagagacatttttgagggtctttaaacatattatgagattactttccaatgtttatattaataaaaatactagcagctaacagttactgagctctatgtctgtgacagacactagatttagtctttcagatgtttttcagttctcccagcaccactgtgggtggacttaggacagttcttgttttatgggtggagaaactgaagcctagaaagatggtaaaagtggccaataagagacagtaataatgacagagtcgaataaagagatatgctatatagaggaagactattttttaaatttcggttattctcaagttgatttacagtgttaacagagttccaaacaaaatcccttaattaaggtaaaatatagacgttaatatttatcaactttttggatgatgtttttaaatttcagtgcaatagaagaaatcatataagacacaaagaagaattaagactgatgtggccaacagatgaaggaatggcaaacaatataaagaaaatatccatatttaaattgttttaaattattagtgggcatttttattctatacagttcgtaatagttttaaaataatttcaacttttattttagattaaaggtatacatgtgcaaatttgttatgtgggtctgttgcgtgatcctgaggtttagggtacagatgagcccatcacccaggtagtgagtgtggtgcccagcaggttttataacttttcagtctagtcccacccacccttagtagtccccagtgtctgttgttcacatctttatatccatgtgtactcagtatctagctctcatttatacgtaaggatatgtggtatttgtttttctgttcttgcattaatttgcctaggatagtggcctctagctgcagccatcttgctgcaaaagacaagattttattctcttttatggctgtgtaatattccatggtgtgttcctaccatgttctctttattcagtccaccattgataggcacctaggttgattccatgtctgtactgttgtgatggaaaatattcatatttcagaagtaaggaaagaagagagggacgacaagacaggttatcagtgtttcagagcaaatgtctttagactgcctgtctcatggagtttgtatgtttttactctaaatctccagtctgatttttgtgtataggagatttacaatggacatttctgcattttagaagtagactatgttgtacagtctcctgttatttcttgggtgtgtctttatgtgtgaatttgtgttttctgttgatgaaacaagaaaaaatatatacttaaaacacccaaatatatctgtagataatttacatatcagttgatgaactattactgtttttgatagaaaatccatgtggcttaagcaagggaaaggtttgtttctctcttaaatgtagagaggtagatagtccagggttggtttggcggtcccacagccattaggacttgggcgtctttgtcagtcactgctcgccattcacctcgtgtgtctcgtcactgtcctaggtcagtgctctagtctgactatgatgcatttcagcatgcacgaaggaggagagtagtagatgaaaatgggcaggagtggaagggagcatatgcttagctgtcatttaaggaggtttctgaatattgccaagtagtacttagaccccgtctccttgaccagaactgtaggtacgtggaacaaggtacattgttttatgcccagctgaaaatcaggatttgtattactaaagagaaatgagagaatggatattgggcagtgtaacaatctttgccccatcacgcgtgcatgcgtgcatgcgtgcgctctctctctctttctctctttcactcatttaagtgtgacaagagcaaaagaaacatttctaatacaaatcagaacaataatcacttgggcccttttctctgctgaatgtaaagttttcataatgaggcattattaggcttggagggtgcctttggcactagagttcccttgacatcatccaagatattctgcgggtagaaggagcaggtgagagaagcggggaggctggtcttggtggggaggagacaagacctggaggtgcagtcaattctcattctgctgttttgagcaaccttctgaagaagagcagggctgtgcaactgaatactgactctgagcccattgtgaccctgctgagagaacacctctaggaggaaagagttctgtattttagaaaaagaagaaaattcgttcttcttttgttgtgtctatattaaattcagaaagaagtaaggctgaccagcaagacttgggagggcacaaattacatccttctgaattgctaagcacaggtccatgtgataggcacttagtaattactttaatgacagtgatgagatggtgctaaaactatcataatttctaactctgtaacttcatgaatgattttatttaaaaacacacactgtcctttttaatttatgcttacagttgtatttgtgatcaaatcaagtgttctctataatctagaatgtactcttaaaatagtagacttctcttatgctccaaaatttaaaactgaaggaacaagtaactttcgtgttttagtatttggaagtcatttcagaatcatataaggaggttagccaaagagaaatgttgatgtaaattttgctttgtacattttgtgccatttttcaactcgattttactgctgaaattacacatgcattatttaaaaatcccagtggtacagtctcaaagacataaatcaccttattttgatcagtttttgaagattgaaacaaaactaatgaaaaatattcttcactaatgaaaaatattcttcactatgtggaagagatttagctgaaatttttcgtttttgacctttgaaaatgttcatgtagtataattagggctttctgcacatgtcatttctttgctaattgttttatacttatagttcatcagatgagagctaaagtgttaaatcttcaatgcatgaagttgaaaatgtaagaaaattgtagaactcacctttgttcctgttctttaattcagaagatattttctttttttttttttggtatactcaaaaatatacatttgcatgtatataaacatatatacatgcacatacatttacacacctatataatgtataacatatagaggttatatattatgtgatatatacatagtatgtataccatcaatttataatacacatatatactatgtttacttatacatgcagctgtagatcataggatacacagacaaaccccaggaatggcagctacctatgtcataccatcctgctgggtgatgcttttcatattcttttaaccaacaactaacttttataatttgaattactttgtcacaggctaattattgaaagtataggtaatttttaggtgttctacttaaagagctattttttactgagtgtattttaaaaaattattatgaaatcttttatgaaactattctcctgattactaaatgaaatatttttagagcttccatgacctcttaaggaattcattttctggtgtgctactaacagtattttcacaaaatgctttaagcatacattaattaggttgtaatagtcttttggatgaattatgtgtttgtataaatgataatttggaaaagttcatggaagtctgatgtgaagaactctattgtttgacaacagtttgaaagatactgagtattagacatttttactttaaaagaaatggagacaaaatcattcaaaggaacgcactcacttaagaattcattaactgtaatagactttatcacccattatttggggacatgaaaaagtgctcatttcaagggtattaagtgccatgttgggtcagatctgcctgctgttctcagatgttgataaccagatactttatctttttggtgaggtgatgagtgtgtgtgccttttattgtgttatctcagaagattagggttataagcaaacattcctgatttttctctgtagtctgtattttatacattattcataaatgtatgaaaatcattactgaacctagttacatttttagtctgaaccatttctggaaggaatttcctaagctttctgaaaaaagtagcagcatgtggtgtgataggaagctgtattattaggtttataagagtgcccagtaattcacgcatgttcatcattatgtaaaaatttcagttattccctatttattattcattttgtagagcactaatgtttaatctgttttcatgttgaatgcatatcctcttaattattttagctgatttttgtctagtgtacttcatttcctcttgagctatacctttgtaaattctgtagagtattagagagagagatgcatcatggttctacagaacagaaactcaagtagtgttttgtgtttttactcctcttcctggcaatactcaacacttttgcttgcttcctgcaggaatgtattgacctgttgcattaggaaatagcccacaacgacttagggagccaggcacatatcacttttcatgacttgcagctcagagcctgtcccgcctagagtaaggtggaggtataattttggatgtgttgctgcaggttgtccatgttgatgcccaccattgttctgctaaggctttcagctgttctgtgttgtatcatctgttcgccttgaattgtattgccactagtgcttcctttttccagcacaggtaaagaattgcctgtgcatttcctctcctaggtcatcattacataagaccattttaatacctcacactatagttaaaattgctctttctggaaaacaaattcctttttattatggtatctttagcccattctcagtgactaagtcttttttctcagtttaatggtaattcatttgaagttttttgtgtttgtttttgtgacttctctctctttagtggagaagcttaccagaagtacttaaagagccaattaagttacagttttaggcccttattttgtcaaagcatttatttttcaaagtgttttagtaagatatttatagtttttatgtttgtttcccctagaagataagatgagcttatatagcatacccagtttgagtatgaggcaggaaaatacattgtttagaggtgaataatttattttgtactattctttctgcagataaaattagtaatatgtattaaaaattttaaagcatgagccttttctcttcaggacattgatctgggaaataattttatgaataatatctcaaaaacacaggcaacaaaagtaaaaataaatgggattatttcaaactcaaaagcttctgcacagcaaaggaaacaacagaatgaaaagacaacctacagaatgggagaacatatttgcaaactgttcatctcaaagggaactaatatccagaatgtactaggaacttaaacatctgaacagaaaaaaaaaagaaagattaaaaaatgagcaaatgatctgaacacacatttctcaaaataatacatatacatgagcaacaaatatatgaaaagtatgctcaacatcactaatcagggaaatgcaaataaaaaaccacaataagatatcatctcatcccagataggatggccattattaaaaagacaaaaaaaaacatgctggcaatgatacggagaaaagggaactcttacacactatgcaggaaagtaaactagtatggtcactatggagagcagagtggaagctcctccagcaatcccactactgggcatttatccagaggaaaggaaatcagtttatcaaagagatacctgcacttctgtgtttattgtagcactgttcacaatatacaagatatggaagtaacccatgtccaacaacagatgaatggataaaaaatgtgctatatatatgcaatggaatacgctattcagccataaaaaaaaaaaggaagtcctgtcatttgagacaacagggatggaactggagggcattatgtttcttgaaataagccaggaacagaaagttaaacaccacatatgttctcatatgcagaagctaaaaagaagttgatttcatagaagtcaaaagtagaacagagaataggagggttgaaggaagagtgggggatagggagagagttgttaaaggatatgaaactccagctagataggaagaatcagttcaagtcttccatagcactgtagggtggctatcattaacaatgattatggtttaaatatgtaggagggtattgactgttcccaacacaaagaagtgataaatgtttgagatgatgaattatgctaattacccattactatatattgtaatgtatcaaaacattactgtgtaccccatacatatatatgattattatgtgtcaaataaaaataaaagtgtgagccttgctacccaacaattacacttttggggatttgttgtatgaaataagagtaacaacaataatagtcaacatttctgtattgcttgctatgttttgggcatgatttaaagcatttgacatacatgtacttacctaactcattgaaatcctgtgagtaggtactgttataccagttttataaagaaattgaggcagagaagattaagtgatttgtccagttttagtctgtctctgttacatccagagatacgcataaaaaatatgtagaggattagtaattttaaatccatttatatttccacaatagaggttatcattaaataagaggagactcatataatagaattctatgaggagataaaaacggcaagtctagccttctgtaatgctaaacttataagaagtataattctattttagtaaaaaggatgttagtatacatatattgaatgcaaatattgtgtgtataaactagaaagccatgcaagagaatattaatagtactgatgaactctggatattgggattaggagtgattttatttgtgcatatgtttttctattttacagtgctttttcattgagcacattctgcatttgggaaagaaaggttatttaaagttgttcttattaaagttactgcatttaattctgtttttgccattgtgtcaggcaagtaaaaatgctagatatcaagttaccagaatcttctctggagcccttcctctgggggttacatgtatatgctgcctgtcttttggaatagtgatttgtaagtgacatggtttaagggtttggaccaacaggttcatagtttcaccctgctttcttttagagctgctggataaattctgtccggtttcaatgatttatctatatttaggttgtcaacctaggtaagaacatcctgtgcagctctctgtttgctctattgagtccttgtatggttatcttgttagtatagtgctaatgataacaggctgtgtgtaaaagctctctgtacacagctgtcgaactctgctgtgtttggtggtgcagactacaccctgaatcctgttaaagaaaacctttgagatcataacaggatgtttggaagttttaatataaatctcttacttatatcaaaagcagttgaagcaaatagtcttaaaatatagtagaattctaatgtatctgacctgcttccttaagaattcagtttggctatggtaatctctgcaatcttctccttaaataaaaactgaaacattaagtctgccccttttctttaatccctgttcaagagggtatgtcgatacttgaacccttttaccagcatttaaagaaccagctgctgctggcatagcatgtctgagattgcattttgtcctgcctacctttttattagaccttgcacagccatatttgtgagtggattagtttcctgtttttgccataataaattaccacaaattgaccagtttaaaacaacactcatttatcatttcccagttttgtaggtcataagtctaggtaaggtatggctgcactaagcctctgccctctcacaaggccaaaatcaaggtgctggtagggctgtctatgttcctttctggaatctctgaggatgagtcttcttccaaacttactagaattgcctgagttcagtttctttgattgtcggatggaagcctccatcttctgccagctcttggccaggggctggtctttgcccatgaggctgctcacatcccttcgtgttttccatgtgaccctgtccagcaagagcagcttgagagccattcaagggaatcttttacttcccttctgctacatctttctgctttaagagatcatgtgattagattggggccagccaagtaatccagagtaagctccctactacatttgaaagtaccttttgctttgtaaagtaacagattcatgggttccagggatccggaacatggacatcttttgggggccactctgcctaccacagtgagcctgttctcatgtatacaaacatactctttctatctgtttagcactacagtggatacccagaccataagcgtcatagtcctgacacacgagttggtaaaaaactaactgggaacttgtgataagcacttatgttagtgttttaggagtttaaaggaaagaaaaattagtgaagatggaaaatagcaaaggccttatagaggaggaagcacgtgaatttcgcccttgaagactactgtggattcgatagtctaatgattgaggagttacagaagtgggggaagaacttgatcaacttgaacaaataggatgtaggattgggcctgatgtgtttaatgtgatagcagagaggcgatattaattaggaggaagtagtaaggaataaaatatacagttgtacaaggtttggagaggcatgcagtggaatttcaatttgaattcctgaaaagggattttagttcaccaagatttgagcgagatagtaatataggaaataagtgtttcataaagatgagtctgggagtgatctgcaggacagagagaaggtggagaagatggagttagccaggtgagcatacgatatggggtttgggccaccacaatcaggcatcttcttatttagatcatcttaaatcttgacttcataggattgttaccatttcaaaacataggctttaagtgactacttcattaactccttcattcaccttactatctttggttttattgtatacaataacttttttttttgaggccctggtgttaatcagaatgatgcatctttctcctctgtcaggctttcagtgcttcacatacttttcagatagtcttcagaactccttcaggacagagagaactgcttttcctatatgaatatagagagagctaaaaattcagaaatttgaagtgattatatgaggatcacccagcatgtcagtgtctccagtagaagtgaaattccagtctttaattcggagacaatgcccaatcactgtggctactcttagaaacaatttaagagaatcttcagacccacagcttaaaataactcacgtacatggcataaaataaatacttgggagttccttggatgcagggtgtttgtcttgattatcttgggtgccccttcagcttattatgggtcctggctcatagaaggagccctgatatgtttattaaatcagggattgatgattgggaccacctgggctgacctttgaacgacttcttacttcctatagtcttcaaaactgccagaggctggggggatagttgacaaaccgggggacgtgctatcctaatctgcagaggtgctatcctaaatcactgaccaattccagctttaaggttcacagaaccttttgaaaaacatgatctggttttaaaattgtttccgtgttgatccattttgatggggggtgaggttcgctattcacatcagtgagtatggccagcctttgtctgcggagatctgattagtttgttaaattcaaagtagcattttagacatgatttcagtaaaggttaggggcactctttggctcttaaattttaatagttttataaaaaccctcttcaagacaaagttgtaatttaatacaaaatcgtaaattggtaaacctgtaacatttgtatcatgaaacaggtgatgtaactgaagattaaataaatgtaaaaaatttagatattgcttttgaattggaaatggcaatatttgtatatttttgacaaagcttgaaggagcaaaatctcatgataaacactatatgcaattgacctgaatgatgtaatgttaaagagccactgcagaagcatttgcaaatcataaattaaagagctctttctcaattaacagttacagatgtcttctcagtgcagggaagtgtgctagggactgcatcctagagatacagtctgtgctggcatagggcttctaacctagtggaggtgacacagatacaggatgtagtttccaaagtagtctaccacgggtccagcgagagcatgcaaacattattaacacagggtaagttaccactgagtgctagattagtggattaaaatgacctttctacccctctctgcctggtgaacggctgctaatctttcaatgttagctaaagctcctaagactcctgtagacggtctttttcgaccccatacagcctttattctctgcggtactcaatgtgcgctgctttccaagcatttgtgatacctcaatgggcatagtctaccagaatgagtgcaggatggggaagtctgggactcccagcctcccagagcacaagaaaaacttgtaactgtcagaaatcagaattaatcgattaataatagcaaatattaagtaacaaatattaaggttaattttttaaatattctaccagccaatttagtctctttgttctaatttcatcttcaccaagcagtcttatggttgtacatttggttttctacccccttatgtggcaaaaatattgctgtgattgtggttatagcccctgctgtcagcttgagacttgatgtctgtacattctcctttgagtctggatccttgatcctggcctgtgattccatctcaggagttagaagcctgtggtgcctggcctgagtcagctcattagcttcattgacaacattggttcgttcaacaaatattgcctgagaagaagacatttaagcaaagacctgcaggaaggaagggagttaactaagtggatatgtggggcaagaacttcccagaatgaagaaacacccgcattaattgcttgaggtatgagaggtgaggtcaggggcaccagtttgtatagggctttctaaaacattatttggagtcagatgacaagctatagaggatgctgagtcaaggtggaaacaacaaaatcctacttaggttttaacaaaattactgtggttgcggtgttgagaatagtgagatggtggcaaggatggaagcggggagatcaattagggggctgtttaaatgatccaaacaaaagataatgaggtaattggatcaggtgatagcagtacagatggcaggaagtataggattggggaatatattttaaaggctatgccaaacaggccttactgacagatgggttatggagtgtgtgtgtgtatgtgcgcgctcatgtacacttgtacatgtacctgtaaataaaggagagaaagaacagacaaaggataaccccaacgtttttagttgagaaattgtgttttcacacacactgagatggggaaactgagagcagcatgtttgatagtcaacgttaggagctcacctttagacatgttcactttgagaagtctgttaggtagccagaaggaactgttgcacaggcatttcgatgtacaaatctggagttatactctgtagaggtccagattagaaaaaaaattggagggtcatcaatctaacaaaaggtttaaaaactgtgggaatgtactgggtgcagtgagtcacatctgtaatcccagcagaaatgaagatcatgctgtaagagagtgggattacaattgacctccccatgtctcaggttccacatgcacagattcaaccaattgtggatcagaaataggtggaaaaaaaccaatacaacaatagaaataatacaagtaaaaaaatataactatttacgtagcatttacactgtattaggtactataagtaacccagtgatgattggaagtgtacaggaggatgtgcatgggttatttgtaaatactatgccatttcctatctgggacttgagcatctgaggttttgggtattcttggtgggccctggaaccaatgcccgtggatcccaagggatgactgtatgcctgtacgtgatgatgggcctctctccatgaatttaagtcaccaggactgggtttggggagtgtcagctcattttctgcctgtttatcagcagacacagatggggtagttttctcacttgcacctacggaaaatcctccttgctcctggggttgtttgactcagtgtctcccttttcttgtgtctgggaggttgatggcatagtacatttactccccaagtagtctgtgagtgtggttggttaaggtggctgaactgaactcggcatctcccagcaccaccaacctggaaagtgtttttggtaggtgctgtgtgtacaacatccttctgattgcaaaggcctgtactctagcattaggtcgggttaattcctgtcaggtcttttttttctcttagagccccatttctaatgaagggattaatttggcaggtgatatcaacttgcaagccaaatttagagttgattttccaaatgacttctcccaaatgccctattatttcctgtctccattgtaaaatatttcttcttcctggaattctctaactccctcttctttgagaaataaaaaaatatcaattttagtgtaataatttgtcttatttaattttgttacttaaatatcattcacattttaccaagcacttaaaatttggataggaatagagattgagataatatagctctactctcaggtaattcacattgtgggccaggcgccgtggctcacacctgtaatcttagcactttgggaggctgaggcaggtggaatcacctgaggtcgggagtttgagaccagcctaaccaacatgcagaaaccctgtctctactaaaaatacaaaattagcggggtgtgatggtgcatgccggtaatcccagctattcaggagctgaggcaggagaattgcttgaacccaggaggtggaggttgctgtgagccgagatcgcatcactgaactccagcctgggagacagagcgagactccgtcgcaaaaaaagaaaaaaaaaaatcacactgtgacctttataggatatctttttactgtccagttttacatataatttaccatggattttttaattaggatacctattttattgtaatctggcaatatttttcacatattggagataatttttgaagtcagttctttgtctatgatatattataacttccatttaataatcattggttttagattggaattgtgtcagctccctttctataacatatagtttccatgtataaagtaatctgagtatatatcttatgtgtgagtgtgtctctgaatttttttcattgcagatagtttggtggaattctatttttagttatgttttttctccatcactttgcttgggaacgctggatgaagtggttactttcatttctctttttcaccatcatgattgtttcctgcagtcccatttatttttgtcaagtttttcttcatgccatcaatctgtctcatttgtgtatctgttctgtttctttttcttttttcacagctgcgaagagccatggatggtcttttatttggttggttttcattcctgatgcatatacaaaccactagagtatgcatttttgaatcttatatatatcttccagatttagctttatattatgaagatatttgtcatttgggcagctgagaaaggctttttccttgagacactctctgcttaccttttataatgttcagacaggaggttgtcagttaacttgctataaatctaccttcagcttcagtgtgatataattatataagttctattattaatgatgcatttctggtttggtctgctcttgatagtgctagtggtcaccagccctgctattttggcatttatagtgagcacatatcttctgataattatatttctcttttataaaatgttttatatacacatttcttttaatgtgtcagcatagcaaatattttccaaatgtccacaacgtctgaggcattgttgtaagcaatgggaatgctatggtaaataagatgccatatacaaattacattctagtgtgggagagagacagcaagtaagaaagacacttgatagagctgcagagtgttgagtactgtgaagaacacgaagcgcgatgtgaacgtggagatgaaggcatgtgctgtggtcatggaaggccttttgggggaagtgactttcaagcagagacctgattgatatgatgccatgaagggcagtttagggaagggagcagcaagtcaagaggccctgaggctggagtgtctcagggccagcaagaaggtcagagtgcctggatgatagttggctagtgggtgagtggtaggagttgaggctggatcatagccagttagagggtgagtggtaggagatgaggttggatgatagtcagctagggggtgagtggtgggaggtgaggttggagggatagccggttagcaggtgagtggtgggaggtgaggctggatgatagccaactagggggtgagtggtaggaggtaaggttggatgatagctagggggtgagtagtggtaggtgaggttggatcatagccagctagagggtgaatgttaggaggtaaggttggatgatagtcagctagggggtgagtggtgggaggtgaggctggatgatagtcagctagagagtgaatggtaggaggtaaggttggatcatggccagctagggggtgaatggtaggaggtaaagttggatgatagctagcgggtgagtggtgggaggtgaggctgggtgtcagttagctaggggttgagtggtgggaagtaatgttggatgatagtcagctaggggttgagtggtgggaggtgaggttggatcatagccagctagggggtgaagggtaggaggtaaggttggatcatagccagctacggggtgaatggtaggaggtaaggttggatgacagtcagctagggggtgagtggtgggaggtgaggctgggtgtcagttagctagggggtgggtggtgggaggtaatgttggatgatattcagctagggggtgagtggtaggaggtgaggttggatcatagccagctagggggtgaatggtaggaggtaaggttggatgatcgtcagctgggggttgagtggtgggaggtgaggctgggtgtcagctagggggtgagtggtgggaggtgagcctggaaaggtagcagaagtgatccaggatcctaaggtgtgagaaagtgcttagattttattgattttcttttaggcataagagaaggccatggaggattttgagtagggttgggctgtaagcgtgtttgcatttatttacaaaaagattactctccttgctgtctggagaatcaaccataggattgcaagagagatcacgtaggagattctcataacaatctttgtaagtgatgaaggcagcttggattgtaggatcaccctgaaaatggtgagaagtggcagggcttgggttttattttgaaggcgtaatacacaggacttgataatggattagatctgcagaatgagggaaagaggtgaacctacattttgccctgagcaatggggtgaattgtgctatttatgaaaaagtggaagactcagagagagaggtaggtttggggctgaaaatgagccccatttgggctttttatgggctcttcctgatctccttctctccccttgcttttgaggtattaccagctacaggggctgaagaaggagcaatcaggccagggtttaaaggggcactgggactgagccagggaggtagctagcatgagtggtaagttgtttacatgcaggggattgaacaaataagtaaatatattgagggtaaagggaactaggtttatcatcaacagataagggatttataaatgtggaaaggggaaagattaaaaagaaccttgaggtgttagactagaattggaagtattaatgtaaacacatggttttggaaacatgtatatataggtgataatatagagacacactcatatacacacccagaaggcctaggagcagtcaatcacttatcagcagtgagtttgccaactgcctagattctggtttgtaaattccatcctctactaaaagggaagggaaccaaggctccttgaaggaatagttaattccaggataagtacaaaatgaccttggaaaactatctgtgctagaaagtaaggaaacactcagaatgatgggagcctttcaagttacaggtcccagcttgaagggactctcactggccaaattttggacaatttgagcaagagagtaaatgatggcgatggatatacattaaataaatgggagagaagcaaagtttgttgttgttgttgttgttgttgtttacggtagaatggctgaggaaggaaggagtaatggagtgaaaaaaatcaccatttggcaaccactgtggtggtggttggttcaagtggtagttattaatagacactaacgttggtgtgaggatgtttgatgagaaacagaatattgatgtagtcttgagatatctcccccaaaacatgtattaattacagagggagagctggtgaccaggtggtcgaggggtgggctatgctcacatcacgtgcctcccaaggagaaatactgagatgggcaccgcatccttgctgacaaaattgtattcctgacgacatcccagcctgagtctgggtacgagaaaacactgacagactctggttaggggacgtggcagagagggacaggcctgaactcttactattatgtgataagtacctttgtggatacaagtctgtatttaagagtattccttagaatagagttctaagaatgtagtaactagatcaaagaacaagaaattttaaagactctcaaaaagtataatcaaattatgtccctaaacctagcaccaatttatatccacactagtcatacataaaaaggacccattatattagctcaaaatagcagtgagtttatttgcacacattttaaaataaagatacaataaaccatagagccttagaaacgacccatttcaacttgcctgagagtaggaattagatatttctgatgcaagaatatcatctgtggtatccttcacagatgttcctcccaccccccgcataaacattttcaatgaaagtttatggattttatgtgtttcatggtggctaaatgattattaaaattttagggcttcccaaattactaaaggaaaatttgtcttttgtaatgttattaacctgtgcaataacctacagaaaacatctactgataatgggttctcaaaatgtaaggagttgatagaacttaaaaattcactcatgctttgtaaaagaaaaatatattgatagaatgaacaacagaaggagtaaatagcatttctgttgtttatttgtgataacattaaaaatactttcacatagataggcatgtgaaatatattatgtattaatatttcagaattattgtgaatatgaagttagcttatgtacataaataaggaaaatgtaggccaaggtagctaaatgcaaacacagaatatcagcattcatttacctcaggagaagttactagtgagtctttgaatttcatctgtgaaacaatttgtgtgataacatattttctgaaagaattaatcacttatttccctatgcataaaaacattgtccacaagtatccataggtcaagtctaaatatcattaaaatttgatttgcagtgagaagtctttatcgtatagttgataacgtctgttgaattttcattgatttggaaatgatgtggcttgtgtttggaattaagctattagaatattctgtcactataactctgcttcatataccagtgaagaaatcatcattcatttaagagtctaacaagatttgactaatatgaactctgctttgaattttggacatgttcctgattgtcacaccagaataccaccctcaaactacatagggtttgcagttgatcttcagtgtggaacttttgataagttcacgtttttacttgatcacatcgagcatatttggggttgatctttatctgtacgctatgctaatgcttaacataagtcctttatttacccttggttttgtattgaaatgttcacgcttatttcgacttaggttatttagtagtaagaaatatgacagacattatcttcatttgaaaaataagcatttgaaaatttaaattttttattttcttaaattttgcatattgaatttagctaccatgtcctttggactttttcactgagaccccagttttcccagccatattccgagtccagcccagtagagaatgtagtttggttagaacatagtgtgtaagtaattaaatttgtgccactacctaagtatgtctcagatagtcaaaaataagtgatacaatgtattcattatttgctatcagccatactattttctcccacattagtgtaggttattgattccattatctatttttgtcgcctcacctaggtaatgacaataaagtgatacatgggagagtttattcttagaaaaggaatgattttgggttactatttatgatgcttatctgaacaatgtaaagtgttacagagtcatattttaaatatacaaagagttcataaggaatactttgcggttcaggtaaaaataagctgtctagaaattaagtaggcttttgttttaaacttgattcatttatttgtactaaagtagcaggttcagtaacacaccatttatctggtcattttccagaataagatggaattttccaggtaactgatcataaattagttttccaggtaactgaatcttaaacttcaaggactgaaatcctataaatttaactattgttgatggaaatttttgtagaacatactttctaccttcttacttttctgtatcttttcaatcagaggatactcaataaaatttgatctgttttctggctcaggactactgttttttccacctccagtacctcttctttctcccttaatgagtttgctttttattcccagtggcttgtgaacccaaagttgttaggaattgttgtttctggtaagccaggatccagggaggctcagagtgagggtgtagggaagaaagagtattctttaatgttggtcttttttattagttgttatcaggcattcacatcttcccactttggttctggctttggcgctttgctctggaaggctgcttaatgggaggtcactgactcctggtacgttaggtctcacctggtagctttgcctcctcttcatggtggagtaaattgagccctgagagtatcatgggaatcactcaagctcacacacactaagtagtgatggaaccctgggtttaagacccaagtcttctgtctgcaagtctagtgttttcctactataactgtcatgttaactccaggtcattattaggaacatagttagtagtcttgataaataaagaaggctctgttatttcttagtgggattcttgcctctcactttcttacctatgttggaaactagagtcatcctagactcctctgcactctgcattcgaagggtgactaaagccttgtctagtttacagcctatgcagcctctagcatcttacctcctctgcgttcttgtcacatggccctctttcaggctcttttcgtctttagccctctttccctccttgttctcctccctgcctctggactcattgtcaaacacaccatgcatcggcactcagaaaaaagtagcaaaaacatggtagtggagaggagagactgtacaaacatgaacagctgaagggcagagaataagtaccaatgagtagaaaaatcaaaacagtccaattattctatcaaattatacatgtattagatcagaaagaaaatgattccagcactgtagccaacctaaaccatgtgattcaggtggagtttggtacagtgcaaaccttgagtgcatgtggtgtgtaacagagacatctctcttaccactctctgaagattaatgtcactcctgataagactctgattagaatcctatttccaacatgtggtgatgctaagtaaacagtactgacaaggctgaaggatgtgagctctactaagtgaattgaaaagttggataaaaagactcgctgataaagatgagaggacactgattactcatgaaaaggaaagaccaagggaggacttccatttgacttcaaaataacatgaattttattattctgatagtgccaccaaaataaatcctatgtattctccaggcagtaagggcttatgttataggcattgttttaaatgtaaatatttttatcaaccgaatatatttaagatgtgaaatcagttatccctataagtctgtaatgaaaaatggcagtactgggtactctgtttatccttaaaatttagaaattcatgttctgagaagtttttttggtattatttctttgataactttcttctctttttgtcttttatctcttttaagaactcttgctagtttcctgttgaatttgctggattgatcttcctgttttcatctatttttctttcatccatctctttggctgcttcccccgccccccattccttgtttcacgataattttttcttagttatgtgaatatattcaatatatttccttttgctttctttgttgcctgtttcatcttccatttattaaaaaaactgttattttcttgtaaaaacccttaacatgagatctaccctcttagcagattttttaaggtgtacaatacagtattgtgaatataggcacaatgctgtatagcagatctctggaacttgctcatattgctttattggaactttttaccttttgattagcaaatccctgcatttggcctccctgcccgacattgttctgttctctgcttctatgagtttcactattttaggaagctcattgaagtgaaatcatgcagtatttgttctctttgaccaggttatttatctccctgagcataagtctcaaccatcttgtcacatattgcaggatttcgctcttttttttaagttaatattccattatatgtatatactacattttctttacccattcatctgtcaccaggcatttaggtgcttctgtgtcttggctattgtggataatgctgcagtgaacatgggagtacagatgtctctttgacttctcagttcctttgggtacatatctggaagtgagattgctggatcatatagtaattatatttttaattttttgagaaacctccataccattttccataacggttgtacagttttgcattcctagaaacaatatatagcattcaaatttctccacatcctccccagcacttgtctttttttttggtggtcccatcccaacaggtgtgaggtggtgttgcactgtggcttagctttgcatgttactgcttccttttttatttctctcggtctctgcctttcacactagaggctttcctcggttgtttgtgatacaggtgttaagaaattacttaggtagatagtgagggtatggaagtcctcagtaaggttttccatttaatgaaaagcagccccaaatcattttcctttctaacagaaaaatctgtgaaatcaagctggaaatagatgccggcagttgtgccaatcatgttcaaaatggtggccccatcttcccttctctttatcagccacgtgtacatgtacagtaaggagcagacaagacagcgccagtcagtggacagctcatttgcataataagattagggtggggtggccagccttccccgtgggctgtgtaaatgtcatgcagtggctcactcctgtaatcccagcactttgggaggccaaggtgggcggatcacctgaggtcaggagttcgagaccagcctggccaacatggtgaaaccccgtctctacttaaaaatacaaaaaattagctgggcatggtgatacgcacctgtaatcccagctactcaggagactgaggcaggagaattgcttgaacccaggaggcggaggttggagtgagccaagatcacatcattgcactccaagagtgagactttgtctccaaaaaaataataaataaagaaaaagaaaactgttaggctataaagagtccctttgtttatctgttagcttaatttaaaagtaaaacatatactattctaattacatgcattaatgttgaatgttaccttcaaaagtttatagctcttatccctaatgccaacaacatctgattactttgcaccatatggctgcagtgtggtgtatggaaagaaagctggctggggacccagccaggctcagtcatactattctttagtagtgtgaccttatgcaggcttcttaacttctttgcttgaaagttttctcagctgtaaagcgcgggccttctataacatggtcccttagcatccttatatttgtaatattccctcattgtatgagaaactatgtctatattggtcgttctttttcagttagtaatcagatgttttctgtgtatgtatatgcgtgtctacatacacagcgtggttgaaaatacataaatacatgtagttaaaacaccacccccactcaaaatagatttaggctatatttgctaatggatcctcataagttcttgcagatattctcatccatgtgtcaatatttgcacataaatcattatccaggcactatatcattttttctcacatcttagaaatgcttttatgtaaacatattcctgaacatatttattactagtcaatatctagtactataatttataaattaataagaaatttaagtttttatttttttatctttttttaaaatctaattccccccctgcatgtttgacttgtgctggcagaataatttttttttttcttagacggagtctcactctgtcgcccaggctggagtgcagtggtgcgatctcggctcactgcaagctccgcctcctgggtccacaccattctccagcctgagcctcccaagtagctgtgactacaggcgcccgccaccacacccagctaattttttttttgtgtgtgtgtttttactagagacggggttgcaccatgttagccaggatggtctcgatctcctgaccttgtgatctgcctgcctcagcctcccaaagtgttgggattataggtgtgaactgctgcacccggccactagcagaataattttttaaaaaatctatgcatggggctcgttggctcatgcctgtaatcttagcacttgtggaggccaaggtgggcagatcacttgaggccaggagttgagaccagcctggccaacttggcgaaaccctgtttctacttaaaacaaaacaaaaaaaccccacaaaaattagccaggcatggtggctcacccctgtgatcccagctacttgggaggctgaggcacaagaattgctcgaacgtgggagatggaggttgcagtaagctgagattgtgccactccactccagcctgggcaacagagtgggactctgtctcaaaaaaaaaaacaaaaacaaaaaacaaacctatgcattgaaaagtgtctgaaagtaaataaagcaaatgttaacaatacttgtattcgttggaatttgaagtgatttttctgtgtatttaatatttttaacaattgatattttattgggaaaaatccattttaataaaagtaccatgctattatgaagtaattatgaatcagtagttgtttagttgaattataaaaccatattctttattgactattaaatcacacatcattaaaaatatttttttcttcaatctctctatttttttaattgaagtataatttacacatattaaaatgcacagattttaactataccctctgagtcttttacccactgtacttaaaatataaaacattccagtaatctcataaaattcccttaaatccctgttatccctcttaaatcagtccattccctcttcgcagacagctaccgatctgatacctatcatcatggattagtgttttctgtttggaacattgaataaatggaactatgcactcttgtgtctgactatcccattatccatttgatcactgcttacagatcttatgactgtcttaaaatacccattgttcttcttttcttaatgtctatgtaactggccctaagtcacacagctgggaagtgctagagccagggcctggcctcaggtccatgtgcccctgagctctttcccctaatcctgtgtgtgccgctttccaaggcccccgactggaaatccgcttgctggggagggttaggttggactgtaaatcactttgtcactctaaggaatttgttccttattcctcatatatggattctccattgtggcaccatgactctttggggttgaaaagaataacaaactgcaagcttgtttaaaaaataatccagtttttcttcagtgactattcatcaggcagcagctgtgagtcagatactgttctaagcaggctgctgactgcgccctggatgtgggatgatctgtctgtgctgtggagtccaggaacttgactcttgatgtgtcggcattttgaggtgtttccccttgagctggtcaggttccctggagaagactgtattcctcttctgcctagaaggtgatagcctggctgccagtgttcaggaagcagagttggggcctccgtgcacaaatccaggtaatctccctgttttcagtgaggcatcctggtggcagataccccagagtctccctctgcaaagagtgaacctccagtgctcctccagggtggagagggcagtcacctagtttgcatgtggggaaagggatccaggcactgatggtttttttcctgcctttcgtggagtctttcttattttggctctcctgggtgggaagacatgacagaccacgtggccttagtccccacattataaggaataaaatccagatttcttagcatgacatccaggatgtcatgggtgggtaggtggatggggtggggcagattttgtgttggcaattacattggccatttgtttgtcccattgccaactgcggctttgggcctcttgggtcagctttcacacctcccactgctgtgatgttttccagctgtccgcattttgtcttttcttgtgtttccacctttaaaagaaaatcctgtgctttttttttgtttttaaatcttggaaggcctttttgaaaaaatcagttcaggtataaatttcttttcattaattttgccttttaatgtatcctcttcactctgaggcaagttcagaaatctgaatttccttatttaccgtgaatcaatgtcatttcgactccaacacttgcctgtttccctgtcagcaaattatccttatttatgcttaaggtaaatctccccacttacctaggcaggccaatgctgtccatatcttggattccatgttaaggaatttgtattttattccttctaatgggagaactgaccaagtccacatggtttcctcgtgtctgcccacccggctacttctgtgccaggcttagggcacaggagtttatactctctatgcaaaccccagaacttcatgaacctggagtgggggcagaaaggcccattcaggcccagatcaagaggaagtcactctggtggctggatgacattttaagtaatagaagagggccaaagaaagtgttccaaaagcacacttatgctgtcggcatgattttatggttgtccacacaaagaggcagacggaatcttcttgaaagttttttgctggattccttttcttgttcctgtcccatcccccaaactggcatgtctcttcaatgcagtcactaactagtgtggctcagttcataggaaagagtgtctggttgttgtttgttgaatactttctgcgatcattatgcagacaagaagaccaaaagcagacagattatattagctctgtcttctttcctcatgccacctgtttgccaggttggtcatattttctatccccaagttaggggctgtggggagatggaggccaggggatctcacttggacctatcaaggagttggagcatggctataaatactttttccagttgctgcttagtttttagcaattccttcaaaactagatagagagagttggtgcttagtttttagcagttccttcacaactagatagataggtaggtagatagacagagcttaaaacaattattagcaagtttccatgggattttaatgggaaaaggagagaggaaatgttgggcctttgcctttattacctggagtacgcagaagagggtttcttgaggaagttttaggctagaacagctgagtttctgcccgccttgaaagtccactatcagagagatccctgctgcctggagctcagtggagatggatggacttgcctggctcattaagagcagggccgtatcacatctgtctttcaaaaccttgcatctgacataattcgtgatgtgtaataggtgctcaataaagggttgtagattgaatgactaaatgaggcagcgatcaccatggcagtcatccacatcagggtgagtagtggaaatgaatgaggttaggaagaattattgcattaatttttagggctcaccaactcagtgcttacaggatccaaatgaaagaataaacactgcccattctaggatgataaatgacagccgaaatttggcctcagtataggggcagagagtggcagcctggagggcacatgcctcatctgatgggagctgttgccagctgcagccagtaggcataatgacatacctcctaattttttttagatttaagtaaaactctggatggtagtgtgaaatatctttacttttcatttcaaatttatgatattttgagtcacaaaaaaaacacatatgtggatcacatttgattgaaggccttctcattgtcctctctggtaaacccaaaagaagagggaggccgggtgtggtggctgacgccggtaatcctagcactttggaagaccaaggcaggtggatcagctgaggtcaggagttcaagaccagcctggccaacatgacgaaaccccatcactactaaaaatacaaaaattagccagacatggttgcagtcgcctgtaatctcagctattcgggaggccgagacaggagaatcgcttgaacctgggaggcagaggttgcagtgggccgaaattgccccactttactgcagtctgggtgaaagagtgatacttcatctcaaaaacaaaaaaagaagaggcctgggttgctgggaaccttcatttaaggggcaagtggaagaaaaataatccttcaacaagactgaaaaggcgcagttaaagaaccagagagagaagtgactctgaatctaagaagaagactttaaggaaggctggtcaaggttgatggacatctgctatgatatgtgctatggggaagtcagagaacacagtgaattgcttatgaatgcagggagaatgcacattcacatgcagctattttgggtctgacacaagcatggtgcagtctgtgacactggtatcacttggaccaaacttgcttttaaagttgtttccataaggctctggcaagaaaagagtccaagatcatataaatttttatgttgaaagccatcattcgtatatctataataaaggactttaaaggagtatttaaaatatttcaaggaatttacatgaaactgtcaaggaatcactatttttatatcttcaccatgatagggtggaccttcgtcttgtcttttgggggaagttatgacagtagatcctattccaggaagttttattttactggaggaaagcccagttaaaatcccagtgttaatttcctgtcatgttaactaccaaagaacagatttccaaagtgtctcaaacatttgacacaatcatttccgttttctaaacttgatctgtgtttcttgggtgatacatgcattctgattcgaaattgaacaaagtatattcttaagtataactatatcctgtctaaggcagtggactcatggagtatgttttcatttttatgttaattgtcgagagtttataagtcattgtaaattagtctgagtgctttgtgtgagttagaaattgtctagtagagcaaaacccttttactaaactcctcctgtgtgcttccacttgctcagagccatgcaggcaacttcttacatgcagaggagggcgtaatctaagccatacgctggtcattgggtggacttccatgcctctatgcctttctcatgtgtgtttgcctctgcctgtaattttccatccattcccaacctcttttccttctcttccttcttatgaagtcctagttatgcttcagggatgatttaatatgtcagtccttctgtagagatccctaagaccttcttaccactgtacccatgaaactttatatataactatggatatggcacttatcaaataatatatttggtatttatttttctcttccacatgactgtgtatatcctaaagtccatgtcactaatttctgcatctaggcatgtatctgacataggggagcttttcagtaactgatggttgaattaggtggaattcctccaataagacatcaccccaatgcatgacttaggcaaataaggtattaaccctgtgtggtgttgaagaaccattaagcttaagagtattaaggagctaaatgccctcttatgttttgttatgtaatttaaacagaggaacaaaaaataaaattctttaagagaagaaggactagatatgtccgtaagccttgataaactaattataaaacttgtgggtgcagcacatcaacatggcacatgtatacatatgtaacaaacctgcacattgtgcacatgtaccctcaaaattaaagtataatgatagaaacttgacacaattatattttaacgtatttcacattgatttaaaatttaattgtcgataagtcatcagcggcaaacccaaactgtagaattttaattcccaatgatagatttttctaatctgtagtagatttcttattatgttatggcctgatacacatagcttagatgtgccttgagtaaaatcatgaccctgaaatctagcgactgtagatgttttacatattagaacttagggcataatttttctccccaacagcagggctggaaaggtgattacatttcagaagggtcctttcagcctgtgccttgtagcgatttggggcatgaccctttgctttacacctgcatagctggtgtggccttttctcccaggctcctgggctgggcctttcctctttcagagagaaggacccagggaagaggggctgaaatgggagacatcgttgtgtgccaagcataggatcatgcctggcctatggtaggttagcatttaataagtgtttatgcaatattgcttgattaaaatagcattgatcttttaatcaataacattattaaaataaaaatgttttaaaatgttaaaaatattttaatatctttacaataactattggctatgccttacagtactattgtctctctttaaacctctcttagaaactgtgtgttaggtttggttttattctttgattactagaagtgcttttaaagaaggtacagagctctaaaaagggcttctttcaagtgtagagagagaaattagaaaaaacatcaaagacaaagacttctaagaaggaaaataaaaattgatttaccttcgctttagaagcttcccaaaaggggagactaggaaaaatagcagaccagaccatactgaaggcttcctttattccctctgttgtctcattccctggtgccaagagcctctttggggagattacactttatggcaaggttgcatttgttgttattttgttctcatctccatctgggacaagcttaggcataattcctatttgtatttcaaattttcctgccaaaaacgtgttgacctatgtctccaaagtaacggaggttatgcatcatttctactctagttgtggaaatcgacaaaataatgtttctaccactagcaagaaaaattgagatgttactgtagagaacttgccattgaaatggcattagtgataggatttgacgttttgaaaaaatagatcccattcttcttggcttcctgttatactccttgcttaatttctgtttcatggacgcgatcactatctgttgcaagtgtgaggatgaagccacagatggctagactctgaccccataggggagccattcttactaaagagatggctcttaagaccaaatggagcactggtagaatgggtgccaggtgagtgggagagactgccttcctcatggtctgctcgtggctggtaatatccttgcaggggccacctctactcgtagggaataaggatgacacatagccacataaaggcaggtctggaaactcgcaagatgtccacctgcttacttctgagaaaaaaagtttggaatggtgcactctgtatgtttctcagcaggcagagcgctgggtttgttgagtgagattgtgttacacgtactcatagacacaggcaggagttacctggacttcatgtttacagtgtgttttaaattctattgatgttcgtatgttgtgaattccattttgggtgtattctgtacgaaaggatgatcttttcagagtatgtaatgaatattaacttcttagtgacttcagaagacccatttattggttacttgatagtacaaacaccaacagccatctgagttctgtaaattgttactgagatgagcttttttatttttgaaaaacgatcatttctctatgcatagattattatcactggccatctctactactgctcaactgaattccttcctcaaccataaccattgtgtagtttttatatttgattattttcctcatatatcgttatccttgactaaaggcctttctccttaggaaatgctttagactacctggccttatagcatcaatttcatttttaaatgcctgtggagacatgcttgactgcatatgaattttctagtagagttctgtaagaattcttcacctcccaaagaccatatgtatccatcttggttcccaacagtttataactgccagaataatttaaaagacattttccctttgcaagttaatttagaatagaacatattttgtcagagaaagtggtgtgggaaacagcttggatcaagcagccacagacctctagcgacctcacaggcagcatggggcctgtagagggcactgcaccaggagtctgatgatgtggcctgggtcccggccatgcccaaatgaggggcgaagtctttcccagtcacttctgctctcttggcttaagtttcttcacatggaaaatgagtcgttggcctaatgatgccccaaagtagcgtttagattttaaaatgtcattgattctagattttaacatctacaagttcaacatgaacgtcgacagctcatttagtcttcataatcctctttgtaccaaagcagattttgtgatcgcattctgaaaacatcaggaaaactaggatatgctacagcacttaccaaccataaaatcaggaaatctaggttatgctacagcacttaccaaccaagaaatctcagtggcttaaagcaagtttatttcctgcttagggtgcacagttagtgtgggttgagtgaggtgtcactgctcgtcacagttacccagggactcaggctgatggagcagctgccatctcagatgctgctgatagctgtcagagggaagcagtatggtggatttgtataaaactcacggactcctgagccttgtactgtaactgagtccctaacttctgcctgcctttcttttctgcagcaggtgaccatcactgatggagggggcaggagagtgtgctcctaccaggactgggaggagagctggtgctatgtggtgggcggcagtattggcaccacatgttacagagggctgcttctgaccaaagccaactttaggagagagttttaattgacgcctaacagacctttgctgggctcatttccatactgtgcccaatgagaaagaactatgaggaatggggaaaaggcctcaggtagaaagtagagaagagtcatgggattgatgcaggggtcagaaaaatggtggggcacaccaaataaacattttggcaggcggtcaaaaggcctagagttaatggctaaagtgaggccaagatgatattgaaaatgttcatctttcatgttgaaagactaatgtgcagtcacttctagcatgatggggatcgtggttttcctcatagctgtcccctgtagaagtctcagttactcctcatccttcaagacttaatgcaaatatttatctgcgtgtattttcttttcctactgaaatgtgaatgtttccaggacaaggagccatttcatcctagcacctagtttacaggcactaagtgaatattacatgattgaaatgaaaccacctggcaaccctctgctatggtgcccatgtgcctgccatcctctggctggttcagcattttaccaggccagagctgggcacagaattggttctgtagaagcagctaaagcaagatgacatttctgagacttctggccgctgttctgttaattttggtgctgtcaagcgaaagggtaatcaaatagtactttgaaatctgaaaagtgaaaagagaaaagtaaactcatacctaaaatataatttctgttctgtatattctagtttccttcttttgagttgctgtccatttagtgtagtgcaatcaagaatacctaaatcagtataacctcgtcattgaaagaaagactttagtaacctattgatatttctgtcttcattattttattattatgaaattgctgaaaataattacacaagtgatataacttttaatcgttgggatgcaaaacagtggttctcaagcttcagagtgcctcagggttgcctggagggcttgctggggccccactcccagagtgtgcatttcaggtggtctggggtggggcctgggagtcagcatttctgtggagttccctgaggatgatgacaccgcgggtctgggaaccacactgtaacgaacaatgatgtacaggaaagggcactggaaacagaaaagcatgggtgtgaatcctccatgctccctaataaccatatgacagtaggtctctcggcccctctaatcctctgtttccaccttgtggaacgtgaaggccctagttgacctaacagatgatcagatgaggttgtacactaaagccgtttttaaaaaaataaggctctctgaaggtatcttcttacaatatcctacagattgagaatcatggacacttgttttacattcagagtatacacagctctgtaccaggtagtggaaaacaggacatggaaagaaaaagagaacaggagaaatgtggcacatgccaagcaccaaaatgagtgatgtgactgtttaaaattaagagaaagacacgctgtggtgggctgcccaggggggacgtctcccaaactgtactgcgtaaagaccatcatttcacaaggaacctgtggtcactttgtgttccaggatggcttattgcacgggtagcgtcctggaatctagaaatctctcatattagtgcatttgggtagtttatcttttcttggactcaatctcaggttacctacccgttagagtttatgaagttaagagtttaaagttcctcattttgcaagcatttaaaagtcatcatctcaacaaggaggtgctactgtaaatataagtatcagaaagatctatgaagtcatcttttcacacttttgatttaactaattgagggaggggaggaaaatctgaaaatctcaaggaatttttaatcttaagattaaaaaatgtagctcatacatagttgaccagcactagcatttttcttttaaggtgtgtgaccttgtctacacttagagttttagataatttttattatgatttaaccctaatgttttaaaattacaattaatagtaggtttagaaattaatgttgtaagtaatatattaacatttttactctactttaagtgctttgatagccacatatttaaggttggataaaaactgtaatttaacagtcataattattataattgatctgaataaaaatatgaactaactgtattggtcaaagcaagttatgtggtaaataaaaattaacaataaaattgaggttttaaaacttaccttgggcaaagactgtatctgggtgatagattgagctctagacagtgaagtgtacctatggatactaactgccgttatgattaataaacacgttgttatacttcaattgtaatagcattttattatgtattatttttcaccaaagaatactaacaggccagttaccactgtgcaggttctgtttaaactcttggcattaaaaaaggaatcctcattcatacttgaaaaagattggaaatccctgacctagtccatgcttgtccatgatactaccctggcccttcatcttgactgactctgtagatcactgttaatgttggtttatgtatttcttacccttttggatagataccttttctaaaggaagcaatgatggaaaactggctgttagctaggttgagatgtgtgcacacttcattacactcttaacaggcagatacccgtcagccttaaaggatgactttttgccaccctgctttcctttctgcctggccatctgcttcttagaatcttccctgaccatgctgtatgttccagtaccttctttgttgaagaacgtattggaaagcatagtcagtgtcttttaacctgattcttccttctgttcttttgaagacagctttgattgtttctaaagtgccaatggaaaaataaatccaagaatttgtctccccagtttttgaaaaattgtagtgtagggcaactgtaaaacacatactatgtactataagtttcccacaattaaatcagtatgaatagttgttgaaatgcatcagttgaatagattagagattcaagtatatatgaagatctgaaatgtaatagacctggcaaaactcagttcatggaaggtggttgattcaataaatatcattgatataactgattatacatctggaaaaaataattgtaggaacccttcccacactgtatacaaaaattaattctagatgaattattgttctaaatgttctaaaaatacacaagtaatagaggtaggtcttaaacctgggtctgtcttactccaaaactactgagctacattttaaatgttaatagataatgcgagattacgagtcccaaagatgagaggagagaaacattttcttttgctaacatttgactttttattttttgtcgtaaacaatgctgagatgaacatcctaatgtctacattggtaagtggatacatgattattttctttttaacacattcctggaaatgaaatagctgtgtttgagggcacccaggcttttgaaataaacttccagattgctctccagaaaggctgtgctaaattagtgactttattcttttgtcatgtttaatatcccactatttttctcttcagaccatcttttgttatggagaaggattgtactcccatcttccttttatattggcaagtttctaattaacctagggcttcctgtgaaatagggagaagctgatattttgtatccttttatcatctatattaataagctcataaagaaagtatcactttgacctcagatatctccttctctagcattaatcggagacttctgttaagatccagccatatagaacaacaacagtagggttttactctccctactatcaatatattggctgtgctggaggtgaggcgccccccttcctcctgcagccagagagctgcatccctgggaagaacctgctcttacatgactttaactacttgccattcaatgtaagtgcagcatatttccaaactgcgtaaaaaatgagctgtgtgaaggcttcctcctgtctttgttatctttcatgcaaacagttctttttgatagaatttggaatttaccgaattcattccgaaggctgtgaaatgtgatctctatgagttatagtcttcctgtgaggatgcgttgtttttgtggaaggcaccaccgggttgacacagtattatttatttttctcccacatacttcttgtaccttcctctgtaaccaatatgagactgtattgaagagaaataatcttgccaagtatttgatatacatagaattctttgtgagttgctatcttaacttaaaaattttaatatgctaaatatccatgtgccaaaggaaaataaaagtaagttcttttcagagcagggacttttatgtcttacagtattcagtgtgaagtaggatagaggtatatcatcgatcacagtgcacaccagacagaatttagagtgtttacatctgcgatcagagttacctggtctcagggcagagcatgttttgttttttttccctactttttagcaaagacttaggctattgtaaataagctgaaaattatcacagaaattgttgaagttggctctgaacaagaatgcttgatctttctataaacagctttattaatgcacgtcaaggcactgttctctaccatttccttctgcttgttgcagaccagctaatgtgttaacagagatctgaatcatgacctttttttcccataggcataggccgactctttccttgagctaaaatttagccagaaaggaaaaaaaaacccattttggtgcatgtggcatgaaaatgaaacaatgcagctttatttagggtctcctttaacctacatcttaaaaatatattttaagtctgtaatatgcctattaaacattagcacagttatcaaaataatgatatttgtaaaatcaatgtgaatatgtgaaatttgtagctttatatacaaatcatatacatgggcatgcatgcatacatatttcaacatattaatatgtgtctatctcaatatatgcatatctcaaatttacatatgtatatcttatacatatataattgagatagcaccaattataaaggatttcttaaagaggctgcaaatttaggcatttgtcattaaataatcccataatatttcagtgcctgaaatcattctagcctttatattgtagtcatttgcgttttcttcccttttctaaatgtagtctccagatgaattaatatactcacaatcaacatactgtggcacgagtaagaactatgtgtattagacaagttcaaagcagtcctgacgctcacttgactaaggcatgtgcctcatgtcccctttaccttcagctcttctgggccactgctgggtgctcattgctgctcctgtgctgactgtctgcagtgtgtgccgtggaatacttctttgcctatttatcatatctttggttcctctccatccttaatgctgaacttttagagcatgtagaacaaatcagaagtctcttgtgctgattatatccatttgacagatgtgttcagaaattttcttgcactcattaaaatataaagtaaaaattgaaatgctttatatgatattaatatggatattactatgacaagtgatagcttacaatgaaaagatttcttttaagaactcttgccatatttccttctattttcatgttttgatatttctagaaaatgtttttactgtattcaagattagggttttgtaatttttagcaatactgctgtggagcctagttgaaattagtgtattactttagttcagactttcttcttatcattcttgattgttaaaagaaataaaggtttacacagaatgtatagcagtgttgagtgaactcaaccagcttttaatatattttttagaaggttaggagaaagattaacctatttaaggacctaacctacttttacatcctgcaaactattttttttaaattttaaaacatttttcgtttttgttcttttgtattttgtttattgtaaccgtagtttgtcaggagttacaacccggccaacaccgggggtggggggcccaacatcacacatctgtgtttgtaatgtagtatttattaatacaggtcatataacattaatgtgtcagcacctcatggatatgtgaattatttaaaatgagcatctgggtactattttttgatatttgaaataaactgaatttttaatgttcatatgttatacgatatgccaagattatcctggtaaagttttcatatccaactggggaatcagcagcaatgtttctccctcatttcttgggtcaagcaagcctaaagttggacacaacctttaaaatgagctgattatggacacatttatacatcattttgttaataagttgtgcatcagttaaactgaaagcttgctttgcttgcctcattggtttttttttttttaatttttctggaattaaaaccactgaaaaataagtccagaaacatcaatttggctgaccttagtttccccctaaatttagtagttttatacagcagaaaacttgtaaagttacttatttacagacaggctctcagtgtgtcacccaggctggagtacagcagcacgatcacggctcaccgcagcctgagactcgtgggttcgagcagtgtttccaccctggcctcccgaagagttgagattacaggcatgagccactgcacctggcctaaatttttttttgttgttgtttttaaggaacaattttctttacagaattatttagaattagaaattgtgaatcacattatcaagcttttaaaaactcttaatttaattgagaaaattaagtattaatactatggcctgggtcgttcgggttgtagtgtgatacaactcctaaacatgaaagattttactcttcttcttcttcttcttttttttttgagccggagcctcgctctgtcgcccaggctggagtgcggtggcgcaatcttggctcactgcaagctccacctcccgggttcatgccattctctgcctcagcctcctgagtagctgggactacaggcgcccaccaccaagcctggctaattttttgtatttttagtagagacggggtttcactgtattagcaaggatggtctcgatcgatctcctgaccttgtgatccacccgccttggcctcccaaagtgtggggattacaggtgtgagccaccgcgcccagctgattttactcttttgaaccctgtggttcctggaagttgaagtcctgtcccccagtagatgcttgttgaatgaatgctcactcagccactctttttgccagaggctactagtttctcacctacctcttctccctctcatctaggctgacatactctgaaagcaaggcagaatttgctcatatattcatttatgatccatattttttccttggaaataattattttcattttgctggaccacgttttagagagcctcacttctgttgatttgattctgagcaatgtttctgagctggactgaccacagagtaagatcttaccttattcatggctgtgaatcatattgagccatttgtcttagctgtcatgcaatttgctaattaggtcattctaggggttgagggaaatgaaagactttgaaataatcattaccttctcagaacaaagcagcagcagttaaatgcttttgcccagtcattttactctgatgttcaataaattcagaagtggaaggtaagttgggatcttactgttgcataattatgctttccagtttatctgaagattgtgcagaagatatttaaatcagtgtcttacacagttataagttgtatatttctgtttttcttattacattttttatcataaaactaaaacctattagttgaagaacatttggaaaatacagagaaatagtaaataaaaaatttaaaagtactcctcatcctaccatctagtataattatttgatggatttctttctggtctttcctattcatatatttttcataaaacttaattattgccttatattgtacaacaatagctgacattttctgagtgtctatttcatagcaggcagtgatctaagagctttaaatgcattatctacttaatgttcatagcaatctaggaggcagttattttccaatgatgaatctgaaacttaagattttgctctatgtcaaaaaatgagaaatttaagacttctagcttggacaaaatggcacagacctgtttctcccactttctcccaactaaatacaatgatagaccccagaaataatgcaagaaacagaaggagaactctaaaacttggtaggaagaagtcaagatggtttggggcccaggactaaaggactgacacaatggcagggcatctcacattccctcacccatcaggagaggcagacctggcctttcttgacctctgaactagcaaccgagatagtccagggaggctgcttcctttttttattcaaatggaagcaagcaagcagccaagggaaatactcttctttcttgctgagatacccttttccagtgtgtgatacctgggcttctgtgaagcaattgttagaaggatcccactgcaacaaatggtccagctgagtagcttctttgtcctcatgcacctaagaccaccttcttctgcccagagaggaataggtggttaggaaagcctaatccattctgtgggcctgaacaccaccactccttctactgagggacactgggcattaggcctggggaagtcccttcactccctcaggcagcatcagcagggacccgtgggagcccccatcagaaccagacaaatgaagcgggcacaaagaatgctgcaaaggctctgaaaattaagctggccctggaaccatagcccacaaaagtagaccaggacccacatactaagcctaaacagggtgactgcctagacaggaaatcagcaaggatgtagaaggtctgaacaacacaatcaagcaacaggactaaattgacgtttctggaatacttcacccagaaaccacagaatacatagtcttccaaagaattcgtgggacattcaccaagacggcgcacatcctgggccatagagcacttttaaacaaccaaactcatgcggagtgcactctctgatcgtagtggagtctattagaaatcagtaacagaaagacaacaggaaaaccttcaaacaggtaaaaatgaaacaacacactattaaataatacatgatttaaagatcaagttttaaaggaaataaaaatacataaaactgaaagcaaaaacagaacataccaaaatatttgggacgcaggtaaagcagttctgagagtgaaatttatggcactaaattactacattaaaaatgaggagagatagagaaagatagttcaatagaagcctccagagattgtactcactcctccataggatcaccaaattacccacagaaaaaatcatcttcataagaaccaagaatcaggtgagcaatcacagtacctggttttagcatcatactaaggaaagaggcactgaggagagtaggagagatagtcttcaatcacctaggccacctttccctcatccaaaaaatataactgataaacaaattcattatagttgctgaatacaaaattaacatccaaaaaggagtagtatttgtctatgccaaaaacaaacaatctgaaaaaagaaatcaagaaactaatcccatttacaatagctacaaaaaaatactaggaattaagttaaccagagaagtgaaaaatccctgtaaggaaaactataaaactttttgcaagaaattgaagaggacacgcaaaaaaatggaaagatattacatgtttgtagatttgaagaatcaatattgttcaaatgtccatattacccagggcaatctatagattcaatgcaatccctatcaaaatacccatgaattcttcacagaaatagaaaaacaatcctaaaatttaaatggaaccacaaaaagccaagaatagacaaatttatcctaaacaaaaagaacataacttgaggagtcacatttacatgacttgaagttatactacagagctatagtaaccaaaacaacatggtatgggcataaaaataggcaagttgaccagtggaacaaaattaaaatccagaaataaatctatacacctacagtgaactcacttttgacaaaggtgccaagaatatacattggggaaaggacactcttttcagtaaatgttgctgggaaaactggatatccatatacagaagaatgaaactagacctctatgtctcatcacatacaaaaatcaaaatggattaaaaactttaagatgtgaagattatgaaactagtaaaagaaaacattggggaaactctccagggcattggatggggtaaggatttcttgagtaatactctacaaatatgggcaaacaaagcaaaaatggacaaatgagatcacatgaagttaaaaagcttctgcacagcaaaggaaaacaatcaacaaagcaaagagacaattcagtgggagaaaatatttgcaaaccatccatctgacaagggattagtaaccagcatatataaggagttcaagcaactctataggaaaatatttaataatctgattaaaaaatggacaaaagatctgaatagatattttgcaaaagaagacatacaaatggcaaacaggtgtattaaacgtcattgatcatcagagaaatgcaaatcaaaaccattatacaacaaggtatcatctcactccagttaaaatggcttttatcttaaagacaggcagtaacaaatgctggcaagaatgtggagaaaagggaatcctcatacactatcggtgggaatgtaaattagggaaaccaccatggagagcagtttggaggtttctcaaaaaagtaaaaatagagctaccatatgatccagcaaagccactgttaggtatatatgccaaagaaaggaatcagtataccgaagaggtatctgtacttctatgttttttgcagcactattcacaatagccaacatttgtaagcaacctaagtgttcttcagcagatgaatggataaagaaaatgtgatacatatacacgatggagtatattcagccataaagaaaaatgagatcctgtcatttgcaacaacactcgttttgttaagtggagtaggtcaagcacagaaggacaaacttcatgtgttctcagtcatttatgggagctaagaaaagtaaaacaattgaactcatggagataaagggtagaatggttccctgaggctggaaaaggttggtgggggtgcagcaagtagggatggttaatgggtacaaaaatatagttagaatgaataagatctagtatttcatagtacaacagggtgactaaagtcaataatttattatacatttaataactagaggccaggtgtggtggctcacaccttgtaatcccagcactttgggaggctgaggcaggctgattatctcaggtcaggattttgagaccagtctggcgaacctggtgaaacctcgtctctactaaaaatacaaaaattaagccaggtgtggtggtgcacacctgtaatcccagctactctggagactgaggcaggaggcagtgagccaagatcacgccactgcactccagcctgggcagcagagtgagattctgtttcaaataaataaataaaaataaaataactagaagagtataattggattgtttgtaacacaaagaagggattagtacttacgtgatggatacccataccccgtttaccctgatgtgattattacacattgtatgtctgtatcacaatatctcatgtaccccttaaatatttacacatactgtagactcacaaaaattaaaaatattaaaaaataaggaaaggtctcaaatcaataatctaagttaatacctcaagaaattaggaaaagaagagcaaaataaatccagaacaagcagaaggaaagagataataaaagcaaaagtcgacaaaactgaaaatagggaaacagtagaaaaaaaatcaatgtatcaaaaacctggtcctttaaaaactttaataaaattgataaatctgtaacaaaatcgagaggaaaagaggacacaaatctgtaatatcaagaatgaaatgggacaacagtacagatcctaaagccactaaaggactcataaaggacaagattacactcacacattttccaactaagaagaaatgaggtcagtttgtcaaaaactgcaaactaatactcaaccaggatgaaatagataatctgaagagtcctgtaaccattagggaaatggagagagggtagtggctatggtcacaaaagagcaagaccaggggtcctgatggcaatagaaatgttcagtgtcttgatgtggtgatggacacaggaacccacacatgtgctaacattttatagaattaagtacacacctacaagtaaatatcaaactgaggaaatctgagtaagataattggattatatccatgtcaaagaaatcctggtcccagcattgtactaaggctttcaaaatgttgccattggggataactcagtaaagggtactcagaatctctttgtattacatcctataacttgcatgtgaatctgttattatctcagttaaattttcgattaaaaaaagctagcagcttgttactttaggagttgaaccctgactgtatgactccagagaccttgttctcattcacacgtctgcatctccatgttatgttgagacattgcattcctagtagttttacatgatcacatgtagatcataccatatgtaaatagaaaagtatgcttgtacattgtctttaacagcaattatcagtattagacaaagcatagttttgtttccctcccccaccccccgaccctgttcctgtctcatagtttgaagtttcccttaagtattcacagttatagtccccaaagactttagatgccacgtggcatgcgtaaagccagcatattctattgaaatggccggtatagttgccgaatcagatgtttttagcttacagaaatgacaatttcatatgacatttcttttcatatgttcaaagaaattacttgagcaaaatgggagatttctggagtaggccataggatcaaaggagttgctggaggggacaagagagctctagtatcctcagagtttggaacctaggacacattctttttatttccatctcatactttcttctccctggattttggcacatactgcctgcagtggaatcattggtggtttccagtatcttctttgaccagtcctgcagtctgaaggaaataacttctgtattccaggatttgtttgaaaagatcatagagaagattagaattagcctggcttggatcacagccctacacttttccagtcactgggcaagaggcagtgattggcctggtacaggccatgtggacagggagggagaggttattgctctgtgaagggagtaagagctgggagggggcagaggggcaatgcagacacagctgttagagcgaccgctgggatccagcagctgctgaagcctgtgtctgagattatcaagtcaagatatctaaatggcagttaaatcatgaacataaaaataattttcaaagtatgcttaattgttcagttttttaattcagcagaatttttctcctctgctaatgacaaggcagtctatattagagactgtcaaaattatttcttaagaagcatttaaacaaataatttttgtagactgctatatgcatttcattagacaaatgtatattctgctacaaattcacataatcatttttccctcactctactcaagactacttagattgtttgaaagaaggctttggctaatgggtattggaaggaatggctgattgttttaaaatatcctgttgcatacaggatgtatttttttgaagggttaagaatgaaaataggaagcaagcatgttccctctgactgaaattactttccttgaagccattagtgtgtaagtcagatgctgaacttacgatatatagatattatataatatgttacatatatacttgaaaataaaattccaaacagaataatgactgttgcatggatatataatggagtaatttactatgatgaagtctgacttgatagcacatcaacacagtaagcctcattttgaacagttctgctgtttcctttgtgaaatggtagttggaagtattgtccgcggttatgcagcatggtgtttatgaagacctttgtggactctgcttggatccatttccaggaaaaaaaatttctctgccagtgaacttttatgtttcttttgccagaaaatggagaaagatgaatgtttcaaatttttttttaagtgccaggatacttagaagcagcctggttcagtgccaagatgtagtaatcagcttcctcagatgtagtcattcattgacgctcttttctgattcaccaccagtgtcttgcaagagctttcactttatctgcctgcagccctgttttaacagtagtgttgacacaactcacctgtgtccatttgtgatttctaaatagtttttaaatcataaatatttgaacctcaaggtaacgctgtaaagtatgaatagagatgacattgtattttttcaaaaaaaaaaaaaaaacacaaaaatctaaacggaaacaagcacagatgaacttaatgtcagtgtaaattgtagattatagacttcacaaggctggtctttgttttgttcactgtatcccttgctcctagtatagtgcttgacaataaatgtttcaggatgattgatgttgaataaacttaaaaagtactcagcacctcacaactttgaagaacatggaaacacttgtattggcagaagacagaaatgtgtagccccaggagacaggagatagctcaaagcaacctgtcatgagcacatttctttgaagcctggtgttttatcttaataacccatacaaaattgaattcttctttgtattaggaatgtttgttttatcatagagattgttttaaatgttacttatcataaaatattatgcttccgcaaaatacactgtttatcttgaataccctagcgtatctttagaagtacgtacttctattgcttttgaaaaatacaaatgtccaattaattacattttattgatgtactgtctatatgctgatgatatccaaatgtatgtcttttatctttatttcatctctgtaattaccattttagttaatggcaagtgtgtttttccagttgattgagaaaaaaaattctaagtcatccttgatgtgtgttttgtttttttttaaacttatatccagtgtgttggatagtatcattgggtttgacttgagaatatatctggaatttggtcatttttaaccattcctactactgctaccaatctgccgccattgtctcttacctggattcctgcactgggtttttagctggcctgtgggttttcccttgcaccccacagcccagtctccacacagcgttggcacgatcctgtaaaaacatcagagcaggtggcacccttctcagcactctccagtggccacccatttaaacagagttcagacccacgtctccactgggcctggcagagccctctctgtatcctcctctcctactacccctccccagctctgctcttccagcctctctggcctctttcctgttcctccaacctgcccgagttgctgctgcttctggggtctgcatttgctcttcccgaaggtgtccagatggctgtttcctacacttcctttgagtcttttctcaaaacatttcaatgaggtcatccccattcattccacctacaatttcgcaccaacccccaaacataaggtcctttctcacattttttttcttttggcacttatcacatctaacatactatatgttttatgtggtgaggatattgaatttctttccttcccttcccccttccccacccctagtgcaatgctagattgcaagcttgatgagggtaggggagaaaggcacctgttacctaagagacctgccaggaaatctttgcttcatcctgatctgtctccacagttctattagaatccttcctttttactctccttgtttttcttcaagggcagggggttgatccctaacaccctcaaaagactgcctcttggctttaggatattaagccaactttttgacaaaaacacatctgagctgctttccttgggcgtcagggatggagcttttattgaagaaaagaaagacactgtctcctctctggtcacttgtttgttcctgggtttcataggtgtgtttctacgtgttagactccacaagcagtgaaactcggagatctctgagaacataagctttctcatgagcactgttttccctgtgggtaggccacccctaaggtggtggtggtggtgtttatttccctaaatggtagttacgggtcaggtgtgattcctggcacatggtaaatgctcagtaaataatttctgaatcaagactggttccctcaattttaatctgatgacttattttctccttatatggattatacttggccttcccattttaacattctgaagctgcaggagatattattaaaggccaggctacaaagagctcacgttcccttccagaatacactgtttctaacaagcaagctgaataaatttctctgaatctggatttaaacaaaattcattataagactggccttgcatttggaacatgttcttataaggaacctgtaagtcatgaatatttcactttcttttctaagttttcttttcaaatgcacatttgctttcattttcttgttaaaatggattgagaaagattaacacaaatgctggtgggaaaaaatatagaggaaataagcattcataaatattttaggcctccgtttttcaacaacccacagctgtgtgtacatagttgatctgggacagaatgccacgccttgtctctacaatgtgttgcctcagagccagtgttcacctggggaatagaacttggatgtttcggaaactgcatagcaccctagtgaaaaatgcttccaagtgcaagacagactcttatctccaaggattccagaccgtattctaccgtttccaaaaataacctgccatcatcagctttgatccctacctttaagataacattttattttctatttgttcaagtaaaacatgttcataaaaagtactttggccttttcttccatagattgtaagtgtaaaaatttgcctaggtttcggtctcagccaagatggtcaactgcatatactactgagttctgaataccatgttagctattgagaaagaataaaagctagagggatgcatgggtgctaaaaactaacaacaaaaatgctaggaaccccttgggagactgaagtgggctttagcttctgtatagtggctaagtagacgggtagctgcagcctgtggacgaggcagccataggtgtctggagagtctggaggaaactggtttttaaaactattttttctaagttatgataaagtatacataacataaacttaccatttttaagtgtactgtttggtggcactaagtgcaatcacgttaagttctgcttttgcctctcctattgccttccctgaattttatttccagcccaattgtcactcacacgtgaggatataagaagtatcttcagctatacaagaccttataaaagtttctatataaagagccacactgaaacatgctgggaggaaatacttaaatatgaagggaagcaaatacacgggcagctacaagagataggggaggtaagggggatcaagtcccctggcaaagttcattgatgtcttgaaaaagaaggctaggacataagaaaacagaaaatacatgcaagtaacccagagctaaacttctagatgttaccgttattgagtggaggagaaaccaaagacggtagggatgaagaaacatacagatggatctgctggggagacattgtgaaaatgaaaagcaagaggtgcagcttttaaaccagcagaagaaaattggatctagccaatcaaaaataggaaaggggaagtgggatggaaagaataaaacaaaaataaaatacagtaaatggaaaatatgaaaaaaagctggaaaagttcaagttttagagtaattacaacgtatattcctggattatccatcgtaaagatgtattctcagatggggcggaaaaacaagatacaaaaaataggttataagagacacacttcaaaagaagttggaaataaaaggatggaagagagagtacacaaatatgaaccaacagaaagcagtggtaacttaaatatattattaaagatgaagaggaatgctatatattgataaagggaatatgacaagaagatgtaaccataaaaaatggtaatctgcaatatagtttgaaaatatatccagcaacaattgacagaattgcagagagacatcaacagttgtagctgaaatttttaacacactgttctcagaaattagtaaatcctacagttgaaaagcaggcagaggtggagaaaacttgaaaaatacaattaataagcatgagctgttaggaatacacctaaaactgcatacttgagacaatgtgtattttttaagctcgtttggagtgattataaaaataaaccgtgtattatgccatataagaagcctcaatttcccaggaatgaaagcaataacaaattaggttcactcagtataatgcaataaaataagaaattactaataaaatgatagtccctaactcccaaaaaaccgcttgtggttacaaattaaataacatatttctaaatagctattgaattaaaaaaataaaattatgatatatttagaactgaaagacagtgaaaacatgacatttcagatttgtaggatgtagttcaagcagtacttaaaaggactttatagcttaaataaacatagtttattaaacatatagtttattaaatattaggaaacaagaaagataaaaaatgagccaaaaagttggtaaaaagaacacaaagcaaatttcaaggaaacaagatagaaaaataaaggtaagtacagaaagcaatgaaatacagaataataataataacacctgacatgatagagaaggttaaaatcaaaacttgattctttgaaagataagatagacctctgacagactcaaaaagaaagaaaagagaagctaaaaataaaatacaggacaatgctggcacctgtagtcccagctgctttgggaggccgagacaggataattgcttgaacccaggaggctgaggttgcagtgagccgagattgcgcaactactttccatcttgggtgacagagggagactctcaaaaaaaaatttattttaataaaaaatacaggacaatgacaaaaaaggaaatagctgtagaccaaagaaattttcaaatgattttattggaacaaaatgtatacttaataaatttgggggaaaagctaaataaaatgaataaattctcagaaaaaaatataaaatgtaaaaattatcctaagaaatacagaacatgatttcaccaatacatggtaaagaaatggagaaagtagtcaaaagctttcctcccagaaagcacctgagagaattttatggttgagttctactaaactttagaaagttggttcttttatgaactaatccagaaaacagtgaagagagagatgttcagcaattttctgaagttaatgaaacctcgattacagtacctgtgaatgtaacagtgtacattaaaagagtgaaggcaaaaatgcgattatctcaagcagtcactgtttaggagacaaatctggatttccaagcagaaggagatataatataggggatcaggtactttaaaagttgtaagcgttggagaagcagttttgggttgtggggtcggtggtaagatcacatgacaatccaggagacaggaagttgctactactgtcacttttattacttttttttttttttaaacctcacaaggggataactagacactggaatatagctgggcccagcaaacacatctctccagtcttgctttcttccatccgctgtagcaggaaaatggcctctacttcacctccctcttccggaggtcatgataaagcatctaaattgcatccagaaccttagctacaaaggaatctgggaaatatggttgttatctgtcagacctattcaacagagggagattgaaatggagtttgagagatgcactataaagtatgtaccacaaatgctcattacctctgctgctacttaacatagcgttttcattttatgtcctgatcagtgctatccaggaagtaaagcaagaggcatatggatctaaaggaatagataaaattgtcattacttatagaaagtatggtcatcttaacagaatttagtaaactgattactagaactaaagagtacaatgacattactgtgtataaacagtcatctcttggtatctggaggggagtggttctggaacctccctcagataccacaattcacagatgctcaaatccctgacttaaaacagcttagtatttggatataacctgtgcgtattctcctgtgtactttaaatcacatctaggtaacttatacaacttgatataatgtaaatgctatgttaagtagttgttatattgttcagggaataatgacaggaaaaagaagtctgtacatattcagtacaaatgcaattttttccgaatattttccatccacagttgatcagatccatagatgtggaacccacagatgcagaggatgaactgtacatatgatcaaactataagagtcaatttattctagtagtatccaattaaaaatgaataaaaacataagatacgacttacagcaacgaaagcaatataatatctatgaattaataagaatgtataaaaatctcttcagggtagaatttaaaatgctaataaaagaccaagattatctgagtaaatagagtttttattctcttggaggtagtcgtaaaaaggtgtcagttcttcacaaaatatttaaaattaaaccccagcatttttattgtatgtttttgggaacttgataaacttcttcttttttttttttttttttgagatggagtctcgctctgtcgcccaggctggagtgcagtggcgcgatcttggctcactgcaagctccccctcccaggttcacgccattctcctgcctcagcctcctgagtaactgggactacaggcacccgccatcacgcccagctaatttttttgtattttcagtagagacggggtttcactgtgttagccaggatggtctcgatctcctgacctcgtgatctgcctgcctcggcctcccaaagtgctgggattacaggcgtgagccaccacgcccggccgataaacttcttaaaaacataaagcagtagaggaaaattgatccacttgattttatcaccattacagattctgttcaatgaaggtatctgtagacagatgggcagatgacagaatggaaaatgatgtaggtgtatggaatgtccacaacttagattaacaggaaatctttgtctagaactgcaagaaactactgccaaaaaaaaaaaaaaaaagtgattgcaatccaaggagaaaaataagagatatgaccacacacttcacaaaacagtgaacgcaaaaggctaaccagcataggaagaaatcttcaagctcattattaccgagagaaataagaatcgaagcagtaaaatgatatccttattacactagcaagagttggctgaggatggtagatacaagtggggatgtgtgaacataggaattgtcatgcactggtggtgggagtgtagacttggcacctatactggagaacagaagttgctgaattaggcccagaaatactgatcccacatttattttcccgggtacgcatcctaggaacacttttagataattgaataagggatatgcctgaggtatagcatcattaaggcaagctgcccttgtcgtgaagtatttacattgttaggttttttaaaaacactgaggatttggtcacttttcgtgttatctacttaaggagaacagtgctttgatgtttgtttattagctttgcaacctcgacaggtatttatcctccattcctcagcggcttcgtgggttgttgtgagaatgaaatggcttgatacctgcaacaggattagaagtacttgtgagagtaaatgcctagtcagtagcagctattattgtggaattattcctagaagccgaagcactgagttgattggtatggactttccaaaggctcatcttactttgaatatttattgtgtgctactatgtgtcttgacgtttagactaagtggtcaaaaattcttgtcctggtgctagaaaactaccacagtaaatggaaaaaaggtaaatgaggtacatgctagtcattgctaacagatgaagctgcagttggagttaatggtaaatgtgcttaacttttgggttatctgatctgttttaattcttcgtttgtatcattccagaattgtcaggaggagatggtaaacctctgagggttttctttggttcttttttggttcctaattgagacaggctagagggctgtgcctttgatggctgcataacattctacatggttctttctttttattttctattttatttatcttttattcatttatttttcttctaaggcagggtcttgccctgttgcataggctgcagtgcagtggtgcggtcatagctcattgcagcctcgaactcgtgggcccaagtgggctgatcttcccacctcagcctcctgagtagctgggaccacaggtatgcacaaccatgcctggctaattttttgattgtttttttgcagagaccaggtctcactatgttgtccaggctggtctcaaactcctgagctcaagcaatcctcccaccttagcctcacaaagtgctgggattacaggcatgaaccactgtgtccaacctccgtggttctttgaacaatgatcattaagagatttgttgtttgaaccagtgtcattattgataatggataaatgcatttaatatgtagtttaatatgcatttaatttaatatgcatttaataaatgcataacttcatatgcatttaattgtagtcagctactttaggtaactgatatactctaatgtcccagcctccctccagatgaaaataatgttgttcttctcagtgttcccactgctctttttccctctattaccatagtaatcactgttcttctttatattgtggtatatgtatatttttttctcactagattttagtttcttctggccggagaccatgggtgattcacctttgaatccctaaaatgattaacattcaagaagtttttgtcaaattgaattccctccttcccccttggtatcatttgtgctctcttctgggaaatatttaaaatgtctccaaggttattgatcactacattctagaggacctcagaaatggttctcaccagccacccatgttaaagggcagacctgtggcagacagagccattataatttatgactctttctgtggtgacagatagatgtggcctttggtaggctccctgattcaaaatggtttatcctgagctgatgtcatctttgggagtacctgtaatggatctgatcaccggatcccttcaggcaccacacaaattccagcaagttttgcccctagctaggagcatatatttattctacattgctaatagacagaaaatattttcccaaaggaattataggcaatttgctttagtatctttatttactatgcaaataaacatttatttttagtttaagttctctaatttattgccgaatatttagtgtggcatatgttttttttttttttctagtaactcattaccatgagtggttcttgggccttaattttctcatctgaaaaattaacgagtctgtatttttttatatttactcatttaaaatttatatctcgcttagttttaaatgttttaaaaagtgtttaaagttagtgaaaagagtacagagaatacaaaaacaaatactatatccagtaagttagaagcgagaaaaacaaggaaaaacagaagtcggaattcaaacgagaaccagaagtaaggcagatagacaaatgctgagagcctggttcatctgccaggaccgtgcatgatttgagtgatctgctctctagcaactaccagggaaaaggaatcccagtcagtcacctggttcccaaggttcatgagataatctctgagaagtacaactaatcatggtgctgggaggagaaggatatttctcttgagaagtctggaggagagcactgtgattgaatgagcccgaggctctgcacttcacggcccctcaggcctggcagtatttggagatcctctgctgctgaggccagggtgtctgtgcccacggttcatcattggtgtctgctttgcattcttcaaggcaattttcacttccaacgtgatctacagaagtgctcacaagagcagaccctcaggaagtggcagccatgactatagaattattcctggaaatcaaagcactgggttaattggtatggattttttttaaggctcatcttactttgtttgaatatttattgagtgctactaatgtgcttggcttttgttaactttcggaggaaaaatttgacctcaggcttgttagagtctgtcctttgtgacacgcagttggtacgttgtttattttatggttaatgtgtccacttggtgcagcttgtgtttgataaaccaccatctccttttcctctgtctcccagaagttcagagtgtttttctctcactttggccttaggaccattattttctcttaccagtctgttttctttataattctaaatcacacacaccagctccatcatttgagagaggtggggacagaaacaactggctcctacttctctgtgtcaccaccagtgtccagttggtttgggccaagccttggactgcatgtttcctggctttttaagtatcccttgactcaacctttttggcatcaggactggtttcatggaagatagtttttccacagcccagtgggcagggaggtgatgatttggggatgaaactgttcagatcatcaggcattagttagattctcataaggagtgtgcaccctagatccctcacgtgcacagttcacagtagggtttatgcccctatgaaaatcaaacgccgcctctgacctgacgggaggagttgctcaggcagtaatgcttgcttgcccactgctcacctcctgctgtgcagctggttcctaacaggctatggacgggtacccgtccacagcccggagttggggatccctgccttaactaagggatccctttcccccaactcttctctgcatcttgctggatgaggaggtttcccatttactccattactctttcaagaaagtctccaattctgtcttatctggaaatacttcttgttttctaatgataggttaattcataacaacatgatcattaacttatgtcacagtcgcagatggcagtggcccggccatatcctgcagtctcacgtaacgaggcctgtgagagtcggtgtaatttactgcactgatgggtccctaaaggcatttcaggctttgctccacaaagtactctcttttagcacaaattaatgttctttgttttgttcagtgacttttgtcaatatataaatcttagaatttattataatcacagtttgcttgcttacttttcatgcatgcttctttaatccagggtgatttatgtgtttatgcatgaatttttctgtcagaatatgaactgagatatttgcacttaaagtacacacgtttgttttacattttctcacagagctaatactttgttttcccaaaatacatttacttaatgaaattcggatcttcatgttgagatgttcatttttaaaatttgactttagttatgttaaccaagtctgcgttacttaatttaatttggagtcgacttactgaagttgataatttacttaaatgtaatagctgaactgcgtaaattttaaaaacttatcctagctatttgatattaccaatctataaaatcttgattttgatgttgttgttcttactgtagattatctttgttattaagagagcagctttttaatttttaatttttttttgagatggggatcttacattgtcacgcacgtgggggtgcagtggcacaatcacagttcactgtaacctcaaactcctggattcaagtgatcctccagcctcagcctcccaagtagccggaactacaggcccgtaccaccatgcccagctaatttaaaaattttttttgtacagacagggtcttgctgtgttgcccaagctggtcttaaactcctgagctcaagtgatcttcctgccttagcctcccaaagtgtgagattacaggtgtgagccacgacatctggcctgaaagcagccttttgttttacagtttgttctaagggaattcaaagctccacatcttttaacgattattactatttgatctaaaacctttttgaagtaatctgctttgaatcatgtgaggagctcaatgaatataacattcttggtaatcagagaatgggattaaatttttaacttggatggagcagttccagcatgagttatgacgaagtgtctagtgacctgttttctaaatgttgaattaaatctgctatctgtattttaaaagctaatcggtatatttctacctagcccttaaaaagccatcactcatactctctttccatcccatcccatcccttctcttacctaagttacttacttgctatctgctgttaggaaaaattttaaaatccacttattgaacatgtacgtacacaagattacttggctaactatcaatgccaaacagtcagtgaaaggacaccctttaaaataagacttttacatcagcaagaaatgactagtatattttattcaactcaacaaacatccactgggcacttatgttcaaagtactgtgggtgatagaactaataagttagtagtttctacctggaagtaactcacattctttttaaaatttttttggtctgtttctttgtcagacctttagtttgtttaatggaatgtcacaaatttcggtcaagtaaggtgtttttgattgatggcagttctaggcaaaaacgcctcagtgaagatggagagcccatttgggatcaggatcatccagcccctcagagcaagagtatggagatcatattcacagtgggtaccaagacctaggcttggcgtaggcatcacttctgactggggaatttcctataaactgcgcagaccaatgaatgaccacagaggagatagctggcgtgtgcgagaaagagcaaagattaagtgagcccaacataagagtgcctagcaaatcgtctcactgtgtgtgagcccaatgcatggtggcttctattattattattttattctgacgagctttactcagtgaagataggcaactattcagtcatctatttgtcaagtgcctgtaatgtaacaggcgtgatactaggtatagaggatttaacggtgagctaggcaaatccagtcattgccttcacaggactttcacttagcaggggcttcagacaagtgcgtgggctaaacagttgagtaaacgtaaacatggtgaaaaatagagggtgctattgaaatgtattcacctgaagaagggaggaagagattcctggaagaattccattggaagacatgtttcagttgaaaagtaagtaggaattgattagaataggaggtggagagagaggtggacagtgttgcaggcagacggagcatctggggtgaccacccaaaagtgagggacagtgccaggccccaggaactcctttatgcagcccaggcacagccaagtggggcttggtgtgggccctgaccctcagtttgctatgaaaatgtctgggctttatcccagagcagtggggtgctatagttgagttttaaatggggtgcttatctgatgaaatacttaggaagattaccctggtctcagagtggagactgtgctgggagggtggaggaagagtggcagaataaaggcattggtgggacgatggctggagctgagcaagggactgacagtatggcctgcacaggcagaagaacacatgtgattacgcagaggcggggccggtggggccagagagagcctcagggggctgagcagagcacccttctctgctgggccagccttgggatgatttatcagcagaaaactggatggatctgtttgttcaagggcccagggaagacaggctttggggagcccccatcacaggctgaggacaacagatgcagctgccccctgagaaacaacagcctccacgtgtgcacctcgggaagaagtgagtcacagtcttctcagtcacacccagcacctgcttaatggccacttcttccagagccagcctttgaatatgaaaaaacaataatcaaatgatcttcttcccaggagttgagtcggtactcctgattagctcagggccaacactaaaactagaaagctggaggctttctgggagccaggctgcgtggtggctgatgtggccacataacattgtgatttttgacccttccttttctaagtcatgctgagaacccttgaagccccctgctgttcttctgttttccattttctccttccagtactcattaaaaaataaataaataaactgaatgtgtaattaagcactatgttttgtgtcctttttatgacaggttcatcaattctacatgcatttactgaatgcttactaaaggcagggctgtattttacatatcattctttgtgaagctactgttttcacttcggttctgcagataggttgggtgttgaagaatttgtagctgaggatagactttgcctctgcagctatccttcctgatcagactagacatatacctgattttttttttctttttttttttgagatggagcctcactctgtcacctgggctagagtgcagtggcacaatctcggctcactgcaacctccacctcctagattcaagcaattctcctgtctcagcctcccgagcagctgggattgcaggcgcctgccaccatgcccagctaattttttgtatttttagtagagacagggtttcaccatgttggccaggctggtttcgaactcctgacctcatgattcgcccgcctcagcttcccaaagtgctgggattacaggcatgagccaccgtgcccggctcacatacctcatttgaccctgtggtgtgaagttgctattcctactgttgttaactgatggcagaacgtaggtttaaggtaaccaacggggctagcatgcttgttgctgaagtatatgaatgcgggaaaaactcctggcctccccactatgcccttggctctggtcagtgctgggtgcagcgtgcctgccatttgcaaagcaaaacctgtaatcccagtccgcatcattcccctccacgcatacattttatgcagctaaagtagtgtataaagtagctgatggaatactgtactgcctggcttcttgaaatttagaaggaaaacatttcatttaaagttacgaaacaaaccaactactcaaaggcagaaataaggagacagatgatgaaaggtgacagaaacttgactgatatgaccatgttagaattacagaattaagaagagaagtaccaattttacaaattacacgaaaggcattttctctgagttgtagaaagtgagtgtgagctgttgtgtgggagcctcttggtagctgtgaagtacgggtagtcatgtctggagttaccctttctgccccacttccagttgctggaatcatcacagcctcccattcctgtgcagcctaaagaatgcctcctttgcctcttacaagacagattcttacgttgaagttgacatctgccacctgactgccataaccaaataccctagactgggtggtttaaggctgggaaatcagagttcaaagtgccaccagctgagtttctggtgagggctcccttcttggcttttgtaggtggctgccttctttctgtgtcctcacatgcctttgcttggtgcatgcatgtgggaaaagggagacagcacgcatgaattctctggtgtctcttcttgtaagggcaccaattccatcatgagggcccctcccttaggacttcttctaacccttattataatgcctcccaaaggtcctatctccaaaggccatcacatcaggggttagggcatcaaacgaatgaattttggggggacacaaacatcagtccctaagaacatctaatttgatgtttttatttaagctaaaagaatgcattttaacattttcgggttggggtgaggggggacacccacattggctgtagatagtgctttttgctgggttttgatttttcaggatgagggaaaatcgatctagagagaaacaatgaaatttcattaagaacttcaaagggactgtcttcataaaggcaatagatgtgtttagagaaggtttgggggatcaacttataaagagcattcaaactcttcattttttttgttctcccagatttatgggaatgtagtagaaacaggcttcccagtctatcatgtgtcattgaaacgcaaaacacaatagcgtttgtcttgttacaaaccaggaggctgtaaatctattatttattttttattaaaggtgcaagttccagagtgaggctcatgaatagcccagagaaataggagatgaagcctttcatctctgttctgttcttccccatgtgagccaggtcaccagtgattgaatgggctttctgctcttgtgaaatatgtttgtttacctggactatgttcaaaaggtaaagaaacaagaaaagggaaagatgaggaaaatcacaaacctgactttacatttcagatccagtttcaaattgtaattagaaaaagcaacattatttccagctgtcatcagaattttctactagaccaggtgtgctttggatctcttaagggatattataaataatgtagaataataatgctgtgccattcagacttctcttttatgctcatcacccccaaataggctccttggcgtcaccgttgtttacggagtgctgacagtggccacacccaggtgaaagcttctggagttacactgtgtacttctgtgtgactctgagctaggtggggccatctgcaagtgagataagctgtgtgttacctggttagagaaagcctgtgacttcctcaggggagtcgcaggtacacaaaacattgagcaaagaagtccccgtttgcagtggtccagttagagatgtcttgctccttgctatgtttgccttttgaggaactgatctagttcatggctatccagaaaataattggattttttggttgtactttagtaaatctgccagtatctttaatttcctagaaaaatgtaagtcataatatattctgtcatttttctccagtgtaggcaacgttatcgatacccatgtgacttatgcatggtgtgtatgtggctgcattttgcctgtgttgagccacgtgcacaaactaagaagtgtttcttatttgctagaaacaggagcttcagcattttgttcctgatgcttccttgattcaggcagaaggtatttacttgtaaattatatacagtgcatagtctctgcaaagcagaagttggttactatttgccgggactgcttaaacctgccctttagagtagcagtttagtttcctcatagctggtcgggcacctgaagaaatagtagacttttgatgtgtatccttttgcacttcaccacggtggatggacttccatcatttttcatcgatgcccttgtggccaccccctgacatgactccttatgcccaatccaccttgcaaagagaggacagcacacacatcctcctggagcctggccatactggaagatttcgcctgcctctgggccccattctaaatgaaatccacacacactcctccatctggaatcgcagacctactgcaagacccccatagcccacctttttattccctttccttacactactctacaaatcatcacatggtcccagtaacaatgagaatagctaatagcagcgctctgagattggttctgttatttacaccattttacagacaaggaaacagagacttgaaggataggtatccaggccaaggttttacggcctgagcgtcatagcatcagagtggcccatgatgtctgaccatgcaggtcttcactgagacgtgctccctttactgttgcccctggacttcatgggctttcatgccctacaggatggctcttttcatgctcttccctctttcttcattgtttgtgcctccacctcaagggtaaccttctgtgcagtaggtccatgatggaacctccctccaggtaatcctcatggaactcacttttgcttctgctctttattgaacctgttttgtgtcagatactgtgctaggagctgtcaatgtctgttaggttaaattacaaggacataaactgagaactgagcccttgaagtgctgtgaggaaggcattttctgtgttagtaacgagtgcactggcttgcattcagcttttgtatggtcatattgtcccccaaccatgttagaagcttcctgagggcagaaactctaacttcctcatctcctgcattgcctggcagctcctgtcatgtccgtacgccttagaggtgtgcggtgactgcattgctgatgtggtttaaaggaacctggagctcttagagaaatgattagaaggagcaagagctgagagactagtgaaatttattctttccactcaacttacagtgagagaggtggcaatgtttctttcttttcctccttcccttgtttttttgtattcatcttgtatattttctctctctaatttgcattattttttatcaggggaacccacccccaatatttcaacataggttctttctattttccattagcatacaaagagaggaattttacagttgggccgccgggggtgacatcacatatcggtaggaccatgatgcccacctgagccgcaaaaccagcaagttttattaaggatttcattaaggattttattaaggattaaggggagggggtgcaagaacagggagtaggtcacaaagatcacatgcttcaaagggcaaaaaggagaactaagatcacgtgcttctgcggaaacaggacaaggcaaaacagaactactgataagggtctatgttcagctgtgcacgtattgtcttaacaaacatcttaacagaaaacaggattcgagagcagaaaaccagtctgacctcaaatttactagtacagggtttcccaatcctggtaagcctgagagtactgcaggagaccagggtgtatttcagtccttatctcaaccgcataagacagacactcccacagcagccgtttatagaccaccccccaggaatgcaattcttatcttagggtcttaatattccttgctaggaaaagaatttagcaacacctctcctgcttgcacatccgtttataggctctctgcaggaagacaaatacggctctttttgcctcaccccacaggcagtcagaccttatggttgtcttcccttgttccctaaaatcgctgttattctgttctttttcaaggtgcactgatttcatattgttcaaacacacatgttttacaatcattttatacagttaacccaatcaaagtggacctgaggtgacatacatcctcagtttatgaaaataacaggattaagagattaaagtaagacaggtgtaagaaattataagagtattattagggaagtgataaatgtccttgaaatcttcacaatttatgttcctctgccgcggctccagctggtccctccatttggtgtccctgacttcctgcaacaacttttcctatataaagggggcttatgaaagtactatcttctactgaaactattccaataaattgaggaggagggattcctccccaagtcattctataaggcagcatcatcctgatagcaaaacctggcagagatgcagaaaaaaatgactttagccaatatccttgatgaacgttgatggaaatatctgcaacaaaatacctgcaaaccaagtccagcagcacaaaaggactccaccatgatcaggtaggcgttatccctgggatgcaaggttggttcaagatatgcaaatcagtaaatgtgattcattacataaacagaactaaagacaaaaatcacatgattatctcaataggtgcagaaaaggcttttgataaaattcagtatcccttcaagttaaaaactctcaataaactacgtgttgaaggaaaacctcaaaataataagagccatctatgacaaacccatagccaacatcatattgaatgggcaaaagctggaagcattccctttgaaaactggctgaagacaaggatgccctctctcaccaatcctattcaagatagtgttggaagtcttggccagtcctggttgtggaaacaagggaacacttacaccctgtcagttggaatgtaaattaaaccatttggaaagcagtgttgcaattccccaaagaggtaaaaacaggcaaagaaagggcatccaaagagagaggaagtcaaagtatcctttgtttgcaggtgacatgattctacataaaaaaactgggtaaagtctgccacacccagaggtgccttgggtgagtcatcatcttggcccaaagtgttcttcagctgataaacaatttcagcaaagtttcaggatacaaaatcggtgtatgaaaatcattagcattcctatacaccaacaacatccaagctgagagccaagtagggaatgcaatcccattctcaatagccacaaacataatgtaatacctagaagtacagctaaccagggagccaagagatctctacaaggagaattacaaaacactgttcaaagaaatcagagatgacacaaacaaatagaaaaatatttcatagtcatggttaggaagaatcagtatcattaaaatggccataatacccaaagcagtatacagattcaatgctattcctatcaaactacccataacattcttcacaaaactggaaataactattttaaaattcacatggaaccaaaagagagcctgaatagccaaggcaatcctaaacaaaaagagcaaagctggaggcatcatgttacctgacttcaaattatactgcagggctacagtaaccagaacagtatggtacttgtacaaagacagacacatagaacaatggaacagaatagagtacccacagataaggccatcacacctagaaccatctgatctttgacaaagctgacaaaaacaagaaatggggaaaggattccctattcaataaatggtgctgggataactgactaggcatatgcaggggatttttttacaccatgtaaaaaaatcaactcaagatggattaaagacttaaatgtaaaacccaaaactataaaaactctggaagatgggctgggcgtggtggctcacgcctgtaatcccagcattttgggagactgaggcaggcggagcatgaggtcaagagattgagacgatcctggctaacaccgtgaaaccccatttccactaaaaatacaaaaaataggctggatgtggtggtatgcgcctgtagtcccagctactcgggaggctgaggcaggagaatcgcttgaactgaggaggcagaagttgcagatgagccgagattgcaccaccacattccagcctaggttatagggcaagactccatctcaaaaaaaaaaaaaaaaaaaaaaaaaaccaaaacaaaaccctggaagacaatctatgcattaccattctggacataagaactggcgttaattgtatgatgaagatgctgaaaacaattgcaccaaaagcaaaagttgacaaatgggatctaattaaacttaatagcttttgcagagcaaaataaactatcaacagagtatgcagacaatctgtagaataggagaaaatattggctaactatgtatctgacaaaggtatatccagtgtctataaggaacttaaatttacaaaaaaaacctattaatcgaatatgataaatcagtgctatgaactaaacagatgctaatcactattattaattagtgggcaaaggacatgaacagaaacttttcaaaagaagacatatgcagccaacaagcatatgataaaagctcaatatcactgatcactagggaaatgcaaatcaaaactacaatgagatgccatctcacattagtcagaatggttatcattaaaagtcaaaaaataacagatgtgggccaggttgtggggaaaggggagcacttacacaccgttgtggggagggtaaattagttaaaccattgtggaaggcagtgtggtgattcctcaaagagctaaaaacagaactaccattcaacccaggaatcccattaatgggtatatacccaaaggaatgtaaatcgttctacgacaaagacacatatacatggatattcattgcagcagtattcacaatagcaaagacatggagtcaacctaaatgctcatcaatgttagactggataaagaaaatgtggtacatatacacctcagaatactatgcggccatgaaatagaatgagattgtgtcctttgcagggacatgggtgaagctggaggccatcatccttagcaaactaacacaggaacagaaaaccaaatatcacatattctcgtcagtgggagctaaatgatgagaacacatggccacatagaggggaacagacaccggggcctacttgagggtggaagcctccctcaggtaggcctgtctcaggtagatctgtctcaggtaggtctccctcaggtaggcctgtctcaggtaggtctccctcaggtaggcctgtctcaggtaggtctccctcaggtaggcctgtctcaggtaggtctccctcaggtaggcctgtctcaggtaggtctccctcaggtaggcctgtctcaggtaggtctgtctcaggtaggtctccctcaggtaggtctgtctcaggtaggtctccctcaggtaggtctgcctcaggtaggtctccctcaggtaggtctgtctcaggtaggtctccctcaggtaggtctgtctcaggtaggtctgtctcaggtaggtctccctcaggtaggtctgtctcaggtaggtctgtctcaggtaggtctccctcaggtaggtctccctcaggtaggtctgtctcaggtaggtctgtctcaggtaggtctccctcaggtaggtctgtctcaggtaggtctccctcaggtaggcctccactctcaagtaggccccagtgtctgctgtggagggtggagggtgggaggagggaaatgataagaaaattaactattgggtactaggctttgtacctgggtgacaaagtaatctatgtaatgaaccctcgtgacatgagcttacataacaaacctgcacatgtagccctgaacctaaactaaagtaaaaaaaaaaaaaaaaaaaaaaaaaaggtaccatcagggctagtctgagacttcagggacttaattcctcattgtaattttgcaaataaaggaaatagagttccctttcacgttctccaggctcttcagcctttagtcttccccagcaacccctacctgctgttttccaactcagagcgtggcaacaactttatcattaagacctcagagatgctgagtggaagagaagtgtgtgtaggaaaaggggggcagataaccaagcaatcgtataggtaatgatcatgcatctagaactccgaagtgtgctgcagagtgcattcccaagtccttccttctgtgacccaggtctagtcctaaatgcagagggcaggggtagggatgggagtaaaagcatttggacaaggaaactgatgttggagaccggaggtatcggtgtcaacactctgcaggcctccagctggttcctgcgtgtaggccatgcagcagctcgaccttgtttacagctctcgggctaatgaggattatcatttatgcctgagagtatgtaaatttggcagttcctgctctaaaataacattctccatctttccgggagtaaactgctttcttagtaaacaaattttcagtgcattatgttaccatttagaaactttcctcttccggtgccaaattgctcttaaaggtgagtgattcataaaggatattttatttaccttgaactcagcttctgtttggaacagtattagaacacaaggagagtcagtaaaccatcgctggaaatatgtgaggagctaagacattggaatccacatctgtatttagatcttgagaggttgcatctgtctagttcatagcactgatttctttatcattcactgagtaactagtaagtacaaaaccctctacttggggagttccttgagatacagaaatgaataacatatcagtctctggcatctgtgcttctacactttggagagggaaataaaacaagtagtaagaggcaggagtcccaggtgccccctgagaggcatggcatgccacagaaggcattggcaggaagactgcgtccacctgcttgcagggtcctgtgaatgccaccgagagggcggcatctgcaacagtagaatttatttcactggagaaagaaggtggcaggcatttcaagtggagggaacaataagagcagaagaaagcatgggactttgtggagcacagagaggccttgtttgcttggagtgaaggtcccgtatcagcagaccaggaaggaataaggctggaaccccagtttggggtcagactccaccccaagtccacaccattctgggagggaacggaatgccaatctaaggtgccagggagaagtgtttgaagtttgtacagcaggggaaagacatcgatttgaatactttttcccttagtatgtttttgcaaacctattttggggtattgtaaaaagattctgtgcttatatgaatttgggaataaacaggtgcttgctgtaaggcttcttagggcccttaatatgctttgtgactgtaggaggggatatgttgtgtcatctccaaacgtatttgaccatgagatctatttgaatacaaacctaatgcacctctttggatttccttggcttcctcctccttgcctggcgttccctgtctagtttcacgtgaaaccccatcccttcaagccccacatgacccttcattctggaccttattctgattgagctttcacttcgtttctggacttggataaaatgctgcaaacagggttgctaagcggccaccaagggctgcctggccccacctgaagtcccctgtggggccgctccttgagagttgaacctttatcaatgggaaccaggaaggatcctggccaggtgctttcccattctttgttgttccacggactgctccaaggtatgctggcttctgagagaactttccagagaagtcgcacgtgcttgggcgtgtccgctgagtgagctggtgtgtttttgggtctgtgcccttgctgaaattggggtgacccatgacttcacgttattttttttttttgagatggagtctcgctgtcccccaggctggagtgcagtggcgcgatctgggctcacttcaagctccgcctcccgggttcacgccgttctgctgcctcagcctcccgagtagctgggactacaggtgcctgccatcacacctggctaatttttttgtatttttagcggagacggagtttcaccgtgttagccaggatggtcccgatctcctgacctcgtaatctgccctcctcggcctcccaaagtgctgggattacagacgtgagccaccgcgcccagccaacttcacgttttgagtgatccactgcctcacatttttccttgcttcctgtgcctgtttccctacatcctgctgccctagttttgtacttccgaaataaaacatcagcatgtaatccttgcctcagcctctgctttccagaggacctgagcaaagatagactctgactgagtgctagagacgggtgtttcacagactcactttggaaaatggctacgtaggctgaactcagacattgagctttaagagtggctggttttgtaatagaccagacaagaaataaaataaggagaggaaacaggtagttgatgaagtgaatcagaacttgtaataaagctagagtaatggatttaagagtaggtctcatagagataattgatgaaagaatgagcgtataggctgcataagttgaggggataggtagaaaaaagagatgacaacattaagcatggaaagagagagaaggaggcgctcttgataaaggactgatggtagctggaggagtggagtgccagggcacaaagctgcaagagccctgaagaggaagaggaagagggtcatgaagaaggaaattgatcagggtcctggattcctgaggtacatggtcagtggtaacagagaacagagggggcatacagcaggtgtgctgaggtggctctgagagacgggagtttggtaggggagggaagaagggtggttgctagacagtacatcaggattgagcacagcataagagatgaaacgggggagaaatctaaagacaggtgtgccacttttgcctctaaacatgtggtataatttttgtcagcgaggaaataaatctgtttctcttttccattttccaagaagggagggaaagagattagaagtaagactgacatctcagggcctctaccatttctttgttgctaaaggagacacagtatgtggctctttgtttcagcaaaacactaatcagctttcggatatgcaaatatgggctgcagagctgattgagtggaagagagctacattgctgtgctaagtaaaggaagaggaattgcctttgatggtggggctggcccaggagagaagcagggaggtgtgtagagtcgctgggggagagagcgctgagggcttcaccattgcctaactctcagtgaagtgtgccacacccagaggtgccttgggtgagtgtcttggtggaaaggaagagaggtaggatttaagtcatacaaaatgggctaagttactgggtcaacatagacctccgaaagagcccgccctaggccaggagtcatgagtgggaggaagtgcacccagtggaggtgaccttgagaatgtgtttcttaggaattcacagcaaattgaggagggctcgagaccccccatgatatatagaaatagaggacagggccgggcgcggtggctcacgcctgtaatcccagcactttgggaggccgaggtgggtggatcacgaggtcaggagatcgagaccatcctggctaacaccgtgaaaccctgtctctacaaaaaatacaaaaaaaaaaaaaattagctgggcattgtggcgggcgcctgtagtcctagctactcgggaggctgaggcaggagaatggcatgaacccgggaggtggaggttgcagtgagctgagatcgtgccactgcactccagcctgggcgactgagcaagactccgtctcaaaaaaaaaaaaaaaaaagaaatagaggacagaagcaattttgttacagtgtctaaggacagagtagccttaactgtcatctgggtatcatgtgggatgtctttatgttttgggggcaaggggaaagcactcactgaagacagaagctgccacttgagcagggaggtgacatgtgctggagctgttgtgagagccagcgtattaagggttctgtaagagatttttttggtaagcgttgagagtgcatacagagtgagcaggcattgtggtgaagcagacagcatagtgctaacttgaggtggaggaggaggaggaaggaccctgggcacagtgcagacatctgggctttgggctgaggccctgtcagagagtgattcttgggcatgtgtgaaaacctttgttgaaagggtccagaaacaatggctaagtcctaacagaactctgctgtggacctagggaaaaggaaagaactaagaatttagcggtcaatttgaggccaaagacagaggagaaattgagggtcagaggggatttagagtttgagattttaaacatttgctgtttgtattagtcaagattctccagagaaacagaacgtgtgtgtgtgtgtgtgtgtgtgtgtgtctaaagagatttattagaaggtgttggcttacgtgattatggaggctgagaaggcccatgatctatcagctgcaaagtggagacccaggcaagctggtggtgtagttcaggagtgttagagccagagagccaagggtacaggttccagtatgagtctaaaggcctaagaaccaggagtgccaagtacaggagaagattgatgtccccgactgagctgtcaagaagagagaaggcagtgtgaatccaactttcctccgctttttcagcccccaatggactggacgatccctacctacatcggggatggccgtctgttttactcagttcaccaattcagatgctgatcttctccggaaataccttcacagacacacccaggaatgatgtttaattaagtatctgggcaccccgtggcccactcaagttgacaaaagtacactgccccttggcctttcctgagtgttatctagctttccatgggtagacatcagctctccacatctaaattgtaagctgctccagggcaggggccagatcttctcctgtgtgttctcagtagctgacacaattgccttccatgtactaaatgttcagtaaacatgtgttggatggttcattgatccaatagacttatgtctatgccaatacaggcttgctcttgaaaagctgcgggtaaatcaattctttgtaaattgaatcttatttcaaatgtagtagggatgttcagcatttcaaggaatcctaggtcaatctttggtggatctacgagccctgtattctgccattctcgttttacaggtaagggagctgagttacagagaaattaagtgacttattataatctgatttgtcagtcaaatataaggtttcttcaagcaaaacatacctgttacttaggtcaagagggatttggtgaaaagcctagctatgaaatttataacatcagattaataacgttatattttcagaagcatttatttttagtctgcagatatttattaagtttgtttacaacagtcttttagttgtatactaatgagtaaaggctatgctaaattgtgttgcagtttatgtcagattagaaacaaaaaacaacagacacaaagtttctggttcagaaaattcacctctgaaagcccccagctcgaagtgtttagtttttcttctgtgaggtgtgagaggatgttgaatgtgctggacaggtgccaggtcctgcgatcctgcagggtgcgttcctagattcattgttgaggtgatgaaagtctcttcagtcagtggcttaatgttaagtgtgagaaagatgttggaaaagatttagggagaccttttgggcacctcactgatggaattattttaaattgagcaggttttatcaacatctgtattgggttgatttagtttctccttgctatcagttctagaataaaatagtttattatatgtgagaaaattgataaaagtgtaaagctactttgcatcactactttggatgatccaaataaaggaaataaaagaatcaaagcattggatttactctgctttcctttctcttcatagtcatttttatgtgttttggcttatcaaaaatgagatcaaagttgttatatactacaaaagaagctgcttttttatttaggattttagtatcttgacatggagcagtgaatcagatgtggggacaggagataatttgtattcatattagatcaatattagctaacagctgttttacggacatcaagtcaattctgcaactcagcagggagaaattattaccccctttttagagatttggaaactgacttcacagttaatgtgggccttttgacgtcagtactgatctcacagttggcgtggagcttttgacgttggtactgatctcacagttggtgcggactctttgatgtcagtactgatctcacaggtggtgttggccttttgacgtcagtactggtctcacagttggcgtgggcctgttgacgtcagtactgatctcccagttgtcatgggccttttgacatcagtacttatttcacaggtggtgtgggtcttttgatgtcagtgcacagactcttcccgtgcaccagcaccacctccatggcgcctccccatgtcttttaggttttgcgtatattactattggctgctgtgagcaccatttttggaagtacattttcatattgcatgaagaaatacctgagactgggtaatttataaagaaaagaagtttaatggactcatagttccacatggctggggaggcctcacaatcatggtggaaggcaaaggaggagtacagacacgtcttaaatggaggcaggcaagagagcatgtgcagaggaactgccctttataaaaccatcagatctttgaggactcactgtcatgagaacagcatgggaaaaaaccacccccatgattcgattgcctcccactgggtccctcatgacacatggggattatgggagctgcaattcaagatgagatttgggtggggacacagacaaaccatatcagaagacagttataatatttgcataatacccagactgtgaggaataagccaagtaataagcaataacagatggaatattgaggttatgcagagtctgtgctgtgcatgtcacagcctgcacttgacctgagtcatgtgcttcctgagctctttacagggtgctaggccaggatatacgtgagagttacagtgattggaaaattagttttcctattagtgtaaatacgtatgtgttaggggatagatgatacactattacagacttataaaatggaaaactaaaattggaatgtaaagcttatagcaggtagcctcaggctgtgctcccaaacctttgggttcagtttctttatgtttcttcagttttctgttacggatactggagcagaagttgaattttagtggatttgatgtaaagaaatgggtatatttcaactttcacctcctttcctgttcctttttttttttttttttttttgctttgaagtgtgaatgaataatactatagacaaaatacaatagcaaagacaaattatggataaattggaaaatcaaactctgcagaacaaagattttttagttttacatcatgtaacaaatttaatgacaaactataccaacaagtgaattgacgatttaagatatttcatttagcttccaaaatgtgaatgctaataagtttgaaatcactaaatcacagtaattccttgcattgggcaacagaaatctattaattaaaatgaaaagtctaaagatattttggggaagattgcaaatttcaaataactgtatgtggtatcctccagttccttttaatagtctcatccttagctgcgcatttacttcacaagggaaaccttaaaaatactgataacagagcctcactgctggacctttagatttaatgggtctgcagtgagggctgagtatagcacttttttttttttttttttttttaaggcctggtcttgctctgtcccccaggctggagtgcagtggcatgatcgtagattactgtggccttgacctcccaggctcaagcgatcctcctgcctcagcttcccaagtagctgagactactggcatgtgccaccacacgtggctaatttttgtattttttgcagacatggagttttgccatgttgcccaggctggtagagcattttaaaaaactccccaggagatcctaatgtgcaaagttaagaacaacggtttatatgataatcattctttaatcatattatttgtttaaaggtagattcctgtattttaacattttaactttaaggttgtgatactctgatgaaggcagctcctatcaacctgtaggcagttcaaggtgttaacctttatctttaatgtttttatgtgtcagatggcagttagtataaggattacctttttccttttgcagtgtcataatactgagtgccaggacctaagtttttgaaacctcccagtagcccctttttaaactgctctgagcctgcagggcacagcatgacctagctgttaatttagtactttcatctgattgacctgggaaggatcactggccgcctaggggagaccttcccattattaattcctgcctggatgtcctttatgtgtctgcacagaggtttcggctttggccacgttgtgaaagtcataaaattaaagaaatattttgcactggctgttcacattgacattcagaaaaacaaattgcagtaatcactggggcctcttcctttgaaagaacatgcgaccagtgcctttttagtttatatcttggtagatttgcagtgggtctgctgtacgttgatgggtgggaagtgttaatgatcactgtgggcccatggccgctggaagctatttgtattctttgcactcgtgtggggcatgtgtgtatatgtgcagaggtgttcatatattgcttttgtttgcattttaaacatgaagctcatttttaaagtacttgcaaaatttatccaatgggaggcaaacctttaaattagtgattctcaaactttgagtgcataaggatcagatacagggaacctggggtggtgtctgaagtttgagaggactggggtcaataaatttccacaaaaggtgacttctcttagatgcccggatacagatgacaaacaaggctacagatagttctatacagaaacaaatgaatatatttttaccatttgtggaaattacagttttgaaactgggaagccctttgtatcactatcagctctatttttggaagtaatggaggaagtatttcaacctgattactgcctgtggagtgaggaatttcttagtgtttgactgaccgcctgctgatactttatttctttagagctcctcaagtcattataagaatcacccaacagtgtgaaatcaaaatgatttcttactataaaatgtcagctatctatcgtaaaagattatgtgccatttaaaaatataattgccgtttctcccctctcccccaccttacattcagatgttccagaataacagaatccctgcaaaatgagaaggaatccctgcaaaatgcaaggatctagcctgtgcaaatttcagaaaccgccttctactttaagtcttttaatagtccagataattatcactctgctcactgcccttttctttctctctacctcctcgtcattcttgcgacattttaatgatgctgtttgtgtattgctgctgatgaattctgcccagtgaaggttatttatttatttttccctgagctggattttaccctctgtttacttatgttggtgttctgtttcctttcctaactgctaccagacattcgtttccatgcctttgtataatgcacagcaggctgatgaagcgtggggactcgcgctgtgggaatcctgcttgggtaaatgtcaccgctttatataaagaactttgctctatcgtagctccagaatctgctcagattgccacaccttaacatatgatctgattattaggaagtatatgtttgttgtgttttgaaacactgatgggtttttaatgcactgctgattaatatgtgaaagtgaaaaccagccagtgaataacctggagtccttgtcctcctgccctctgcaggcttgcagggcattgggcagctgggacttgtacctaggacaagattacccatctgtggaaacgcattgctgacacctggacaaaacgagtgttgcaagtggaaatcagtggagatgcagaagagaattttgcctctgtcctgctaatggggaacatatttaacttggtgcagtatctgcagtaagctagtgtgttaggtactatttgaaggagtcttactcatcatcaagttaatttcttgactttaagaacgtatttatgcagcagcccttttctcagcacctctggacttttgaaaagtggccttttgtcttatttctacatagaagcactgcccctgtgcttccctttctggtgtagggcgcatggagcactggggacaaggtggggctgtttctcaaatctcctgcccccaggtctggggatagtatgtgatgcacatgagcttcaccatgcatcagctgccccgttctccaaacctagctttactcaaagaccttggtggtttggaagtgctcagctcatctttgtatacttctacttgttttggaacatcattcctttgaagaaaactttgaagacagcttctcaagatgtttgtctttcctattgccgtactgcattgactagcctcagctaaggacctggactaaaagataggcacccatgcttactggggaacctcttgagtctttaagaatgtatatgcaagcttcaatcaactgatggatgattcccctccaatctcccttcccttcctcctgctcactggccactggcgacacccccaaacaaaaagctgtgtatacgcaagagggcatatggcacagtgggtgagaacgtaagctcttgagacaggttccgggttctggctttgccacttcgcagctcttttctctttctgaacccctgtgtgcccgttttctcatttgtaaaagaatgaagataatagcacttaccatgcctagcataaactgttgtttcctaaatatatcattttaacaactttattgatatataatttacagccatagggttcaccattttaaagtgtgtaattcatgatttttaacatgtttagggagttgtgcaaccatcatcataatctaattttagaacatccccaaaagaaaccatgtacctactaggagtcactctctatctcctcctgcctctctgccctgcttccctatttcccaggtaatcactcacctactttgtatagatttgcctactagggacatttatattaatgtaatcatacatagacggtttttgtcactgacttgtttcactcaacatagtgttttcaaggctcatccatgttgcaacatgtgtcaacacccaaattcctttttattgcagattaataaagtgtgtggatataccacatattgcttatccatttatcagttgatagacatttggattgtttctgctttttggctatcatgaataatgctgctatgagcattgataatacaagtttttgtgtggatgtatgttttcgtttctcttgagtatatacctaaggatggaattactgggtcgtatggtaacttgatacctaacattttgagagaccgccaaaccatttccattttacattgccgccggtcatgtatgagggttctgatttctccacatccttgccaacacttgtaattgtttgtctttttgattctagtcactttactgggtggtttgggtgggttacctcattaattgtgactttgattttaattttcccagtgactaatgacattgaacatttttcctgtgcttattagtctaaatatactattgattgtaagaaaaattgcttactgttttagagataatactgatataagaaccatcagtccctgctttcattagaggggcaagagtgaggatagttttaaaatcaagcatacttaaagaatcatacctgcatctcattaaaagaaaatgttatttctaggtaaagctaaatcatcattaatgtatagggtttactgtttttctagtaggtttatgtgtagagcactcattttgtttggtttaatctctagttgcttttatgttttaatttaacaaaaatgggtgattggaaagatggaaaatacccttgttgccaccacagtgagttccaatttgatttcagcaacgcgtagaagattgaagtcagatgcagccaattttctcccgattactttttttttgaatcttgcctgaataatgtgagctttttcagctagctaattaacactgtttttttctgccatattggtgactttatgatattttgcttgtaattatatatatattcatttatatacttctaccctattcgtaactttatgatattttgcttgtaaaaaattatatataaattcatttatatacttctaccctatttattaaatgtcccctgcatgaaatatatattaatagctactgcatggattatctttgattgcttttctaataacagttatctggactttgcttggtcttgggtaagaggcatatttgtatgtatattttctcatttttgaaacagaaacataaactgttgcctccgatatatttaataaaactcaccagcactactgataatatttaattatgcagttataattctattcatttttagtttacattctgaatcttaggggcagtgaggcagagtgacatgatcatggaagtatttgtaccacaggggtttgaccttgactctgccacttcctgcgtgactttgaactagtcaaagttaccagttcaaagttagactttgaacgagtctaattgttagagaatggcatgaacccgggaggcggagcttgcagtgagcccagatagtgccactgcactccagcctggtcgacagagttaagacttcatctcaaaaaaaaaaaaaaaaaaaaaaaaaaaacaacaacaaaaaaggaggttacagtctgtttatgttgtctagttactagtcaacactaaccactctggctcggtgttttaacctgtctaatgggtattttttttttttttttaagtcataccatctacctgatgcggtcgttgtgagaacatttcagatagtatttattaaaatatttcctccttggtatgaagtagatgctcaataattgttaggtagcacagattaattatcctttatctaaaaattccaaatctgaaatgctccagtgagcatttcctttgttggtgctcaaaaagttccgcattttggagcgtttcagtctgtcgttccaggggtagtaacagaagctgtcatcttgctggctcttccatctggctgggttgcatgagagttaaacagtaataggagaaatgaaatttcagtaataggcagtctccttagcacaataattggtacaagagagtaagtctgacagtgccagtgaccatcagaacaaaccacagtcattgtggtaaagttgctcgaggcagtgactgaggaaagtgtgtctccatttctgtaacaatgggtagatgtctgctctaaggatttttaattgaggtaaaatgtacagaaagcatgaaaagaatttcatagatgttaagtgcataagccggtaagttttgacaaacgcatggactttgtgaccacctcctcactccagatgaacgtctccatcacccctgcaagttccctcaggcccttccaattaatctccatccctgtaggcagtcgtttttctgatttcttttcaaatagataaatattacctgtgcttgaatttcatatgaaggaaatcaaaatgttaaaagaagaacttcagacaaaggaaatttagcagagtttaattgagcgaagactaattctggaatcagaagcccccaggctagcctaagttcagagtaactcatgctgccacatcatcagataacacttatgaacagaaaaaggaaagcaccataaaagatagaagtgaggtacaggtacagaaacagctagattggttacagcttagcgtctgccttacttgaacacagtttgaacactggccgcctgtgattggccaaaactggtataagagtaggttacaggctgagcgaggtgactcacacctgtaaccccagcactttgggaggccgaggcaggcggatcatgaggtcaggagatcgaaaccatcctggctaacacggtgaaaccctgtctctactaaaaatacacaaaaaattagccggatgtggtggcgggtgcctgtagtcccagctactcaggaggccgaggcaggagaatggcgtgaacccgggaggcggagcttgcagtgagcccagatcgcgccactgcactccagcctggtcgacagagtaagacttggtctcaaaaaaaaaaaaaaaaaaaaagaggatgttacagtctgtttatgttatctagttacagttcactttgtactgagaaaacttctccccttttggtcaacttctccattttcacatcactctttcagtgtcataaagagactgaaacctcaaatcccactgggaaatagcagaacagtgggttttgtaagatagaaacaggacacagaacaccggcggcggggaggccacctgttggttacttcaggttgctttttcgaaagtgttagagagaacttccttattatgctggagtgtcccattttaggaggaaaataacctgctctgttttgagattgatctgtttccttacagtcttagtttgattaggtcgcatttagctcagtgacttcattttggtttggtctggtctgtcggggcctaggggagaggggctcagtgcagtgcaatggcctcccataattttgttggacaatacagtacagacagttttgtttttgacttttttcacccatcaaaatgtctgtgagattcctcgatggtgctgagtttaccagtttgtttctttttattgatgtacgtctctgtcgttttccatgtagggcactataaataacagtactttgaccgtttataaaaaattactcgtgtggatgtatgctttttttcctcttgggggaaatatccaggcctggaacttctggatcattgtgtaggtatttaattttatgataaattgtaaagcctttttctaaagtggttgtaccatttttacatgttcaccagtaatgtatgagttgcagttgctacacctatttgcctacatttagtgttgtttgtattattcaatttagccacttatagtttctgatgtcaaatgatgttgagcagcttcccatgtgctcgtgggctgtttgtagatcttcctttaggaagtgcatgttcaagccttttgctcattttatttatatatttccatttgtcttttctatcattgatgagtaggcattctttatagactctggatataaattcttgcaagatatgcattatcagaatattttctcttactctgtggctttcttattcaactcaacagtgtgtttgttctaaattaagctttttatttttattttattttgagatcattgtagactcaaatgcaattgttagaagtaatacacagagatcccgtgtacccatgtagactctcccaatggtaacatgttacaaaagtataatacggtattacagccaggacaccagcatcagggcagtcaagaccagaatatttctgtcagcacaagatccctgcattgccctttaattgtcacaccttcctcatttcccttgtccccatccctggccctggcaaaccctaatcccttctctatttctatacttttgtcatttcaagaatattatataaaaggaatcacactgtgtgtgaccttttgggatcacatttttgtcactcagcaaaattcactgcaaatttatggaggttactgcaggtatcaatagtttgttccattttattagtgagtagtaaaccgtggtgtggacatataacagtttgtataccattcaccttttgaaggacgtgggctgtatttagcttttggctgtcatgactaaagctgttacctaggaaggtttctgtgtgaacatatgtcttcatttctttgggataaatgcccaagagaacagttgctgggttgcatggtagttgcatgcttgcttttatcagaaaccaccagtctggtttccagagtgtctatagtactctgtgtagccaccagcaatgtgggactaatccacctttttttttttttttttttttttttacatcctcaccggcatctggcgttctcgctgttttttactgtagccattccgatagatgtgcagtgatatctcatggtggtttaatttgcgattctctaatcgttaatgatattgaacatcttttcatgtgctgatttgccatctgtagattctctttagtgaaatgtctgtttatatcttttgctcattttctatttggattgtttgtttcctgctactgatttctgcggattctttgtatattctagatgctagttctttttcagataatgtggtttgcctgtattttctcctaatctgtgtctgtcttctcatctctccgtagagtcttttgaagagcagaaggttttaatattgataaggtttaatttgtcatttttcttttgtgcattatgctttttatgtcaggtctaagagtctttgcctggccccacattacaaatattttctcccatttttttgaaatgttttatggttctacgtttaagttcctggtccattttgatttaatttgtatagaaggtgtgaagattaggtaaatgtttgattttttgccttctaggtattcaattgcctagcatcatttgtttaaaagtctgtccctcctccactgaatttttcacttttctcaaaagtcagttggctgccttgtgttgagtgtttgccagctctctattttatgtctttgatccctctatgaataccatactgtccttattactgtagctagatagtaactttgaaatcaggaagagtgattcctcatattattttgtaaaattgttttagatattctacttccttttttcatataaagcttagaataatcttgtatatatctataattaaatatgctggtatttggacaataattccattacacctgtgtgtctggttgcatagattttacatttttactatgttgagtctttaattctatggacatggtgtgtctcctcatttaattcagtctttttgatttctgttaccagcattttataattttcagcatacaggtcataatttctaaagtttatacctaagtatatcattctctttggagtgattgtaaatggtattatgtgtttcattttggtttctaaatgttcatcgtttatagaaatgtgattgattttgtgtgttgatcttgtatcatgtgaccttgttaaacacattagttctagaagggctgtgtgagtgtgagtgtttagcttctttgggatttcctacatagacagtaacatcatctacaaataataacaattttagttctttccttccagtatgtacatcttttatttatttttattcagtggcgagaccttcctatactatgttgaataggagtgatgagagcagacatccttgattcattaccaagtttacggaaaaatcgttttgtctttaactgtgttaagtgtgatattagatgtagtttttttttttttttttttttgagatggagtctcgccctgttgcctaggctggagtgcagcggcgcaatcttggcttactgcaagctcccgggttcacgccattctcctacctcagcctcccatgtagctgggactacaggcacccaccaccacgcccggttaattttttgtatttttagtagagacagggtttcaccgtgttagccaggatggtctcgatctcctgacctcatgatccggccatctcggcctcccaaagtgctggaattacaggcattagccaccgtgcctggccaatgtaggtttttaaaaattgatttttaaataagattgacagaactcctctctattcctaattcggtgaatagtttttaagatcatgaatgttgtattttgtcaaatgctttttctgcctcaattgatagctcacctaatttttttccttatcccattgatgtggtagattctttctttttttgttttttgaatgttgaaccagccttacatacctagaagatactctacttagttgcatatacgttattttaatacattactggatttcatttgctaatattttgttgaagatttttgggtctaagtttatgagagatactggtctatagtttacttttttgtatttgtcaagattttatatcaaggtagtaatagtcttcaagaaatgaattgggagatgtttctttctctactgttttctggacaaaattatgtacattggtgttgattcttctttaaatgtttggtagaattctccagtgaaatcaactgggtctggagaatttttattgagaagcttttaaattataaattcaatttctttaattgcttatgggactatttggactattaatatttcattttggctgaattttagtagtttgtagttttctaggaatgggtttctatcttctaagctgttaaatttgtgagcttaaagttgttcatagtattctttttttaatgacttcaatatctgcagtgataccattgttggtgttgatgatttgtgtcttctctctttttatttattttagtcttgctagaggtttatcagtttttttctcaaagatccagctttcttatcaatttatttatttatttaaattttattttattattatactttaagttttagggtacatgtgcacaacgtgcaggtttgttacatatgtatacatgtgccatgttggtgtgctgcacccattaactcgtcatttagcattaggtatatctcctaatgctatccctccccccttcccccaccccacaacagtccccagtgtgtgatgttccccttcctgtgtccatgtgttatcattgttcaattcccacctatgaatgagaacatggggtgtttggttttttgtccttgtgatattttgctgagaatgatggtttccagtttcatccatgtctctacaaaggacatgaactcatccttttttatggctgcatagtattccatggagtatatgtgccacattttcttaatccagtctatcgttgttggacatttaggttggttccaagtctttgctgttgtgaatagtgctacaataaacatacgtgtgcatgtgtctttatagcacaatgatttataatcctttgggtatatacccagtaatgggatggctgggtcaaatggtatttctagttctagatccctgaggaatcgccacactgacttccacaatggttgaactagtttacagtcccaccaacagtgtaaaagtgttcctatttctccacatcctctccagcacctgttgtttcctgactttttaatgattgctattctaactggtgtgagatggtatctcatagtggttttgatttgcatttatctgatggccagtgatgaggagcattttttcatgtcttttggctgcataaatgtcttcttttgagacgtgtctgttcatatgcttcgcccactttttgatggggttgtttgtttttttcttgtaaatttgtttgagttcattgtagattctggatattagccctttgttagatgagtaggttgcaaaaattttctcccattgtgtaggttccctgttcactctgatgttagtttcttttgctgtgcagaagctctttagtttaattagatcccatttgtcaattttggcttttgttgccattgcttttggtgttttagacatgaagtccttgcctgtgcctatgtcctcaatggtattgcctaggttttcttctagggtttttatagttttaggtctaacatttaagtctttaatccatcttgaattaatttttgtataaggtgtaaggaagggaatccagtttcagctttctacatatggctagccagttttcccagcaccatttattaaatagggaatcctttccccattgcttgtttttctcaggtttgtcaaagatcagatagttgtagatatacatgcagcattatttctgagggctctgttctgttccattgatctatatctctgttttggtaccagtgccatgctgttttggttactgtagccttgtagtatagtttgaagtcaggtagcgtgatgcctccagctttgttcttttggcttaggattgacttggcgatgcgggctcttttttggttccagatgaactttaaagtagttttttccaattctgtgaagaaagtcattggtagcttgatggggatggcattgaatctgtaaattaccttgggcagtatggccattttcacgatattgattcttcctacccatgagcatggaatgttcttccatttgtttgtatcctcttttatttccttgagcagtggtttgtagttctccttgaagaggtccttcatatcccttgtaaggtggattcctaggtattttattctctttgaaggaattgtgaatgggagttcactcatgatttggctctctgtttgtctgttattggtgtataagaatgcttgtgatttttgtacattgattttgtatcctgagactttgctgaagttgcttatcagcttgaggagattttgggctgagacgatggggttttctagatatacaatcatgtcgtctgcaaacagggacaatttgacttccttttttcataattgaataccctttgtttccttctcctgcctgattgccctggccagaacttccaacactatgttgaataggagtgctgagagagggcatccctgtcttgtgcccgtttttaaagggaatgcttctagtttttgcgcattcagtatgatattggctgtgggtttgccatagatagctcttattattttgagatacgtcccatcaatacctaatttattgagagttttaacatgaatggttgttgaattttgtcaaaggccttttctgcatctattgagataatcatgtggtttttgtctttggttctgtttatatgctggattacctttattgatttgcgtatgttgaaccagccttgcatcccagggatgaagcccacttgatcatggtggataagctttttgatgtgctgctggatttcggtttgccagtattttattgaggatttttgcatcgatgttcatcaaggctattggtctaaaattctcttttttggttgtgtctctgccaggctttggtatcaggatgatgttggcctcataaaatgagttagagaggattccttctttttctattgattggaatagtttcagaaggattggtaccagctcctctttgtacctctggtagaattcggctgtgaatccatctggtccttgtattacttttctctgtccctttttactgattctgctcttacctttattattttcttccttaaatttattttcactttccttcttttgaggtaggaaggtgggttattgacttcaggctttccctctttctaatgtaagcattttagtgctatacattttcctctcaacacttctttagctgcatctcacacatattttgatatgctgtattttcattgttttgtatattttcattgttttatttattttttatttaattccagactttttctttttcttttcttttctttttttttttttttttgagacagagttttgctcttgttgcccaggctggagtgcaatggtgtgatcttggctcactgcaacctctacctcctgggttcaagtgattctgctgcctcagcctccagagtagctgggattacaggcatgtgtcactacggcaggctaattttgtatttttaggtgagacagggtttctccatgttggtcaggctggtcttgaactcccaacttctggtgatctgcccacctcggcctcccaaagtgctaggattacaggcatgagccacggtgtccagccccaaacattttttctctgacttgtttatttttaaaaattctgtcattcagtttccaggtctttggagatattcctgttgtcttttggtttttgttttctagttttattctgttaatactatggccagaggatacactctgtataaatttagttcttttaattttttttaggtttgtttactagtctaggatgttttctatcttgattaatgctctatagcacttgaggaaaaaaaaaacaagaaacacacacacacacacacactaggtgtgatgtctactgtataatgtaattgttttccaccttgtggttttggcatttgaaagaacagttaaataatccaaagggatatattgtggaattttaggctgtcaggaagtttttactgtataattctatctgtaaggagaaagcatacgtagctcagtgcttattagattgttttatggtttgaagaaataatgtttcacttaaggaaaaatattctcaaggaaaaaatgcccacagtcgtcagtgaactgctgagtctcatctacttcattgctcaggcatgtaagaccttcctgtttactaataatgttgacttttccttcttattgggaaggaagctaaagaacagcttgatggtttaaaatgatgcacctaaattattgattccattatatatttaggcagtacatttttctctcttgaataatagaaatgtcacctactatttaattttcctttttttttccagagtaattttcactatgtctgattacataattagatttgggataccaactgggtatacttggtaagaaaatgagaattaaaatgtttcagagtaaaattatttcagagcttttgcaaatctttattttagataaggtgatttctatttttaggtttgtttttgaaatagtctaggacatttaaattttaacttctgatcaaattaagttgttttggttcatttaatttgtatgtttcatgtctttgacaaaagttttttttttaattgatgattttttaagataaaatttatgatttggaatgatccaattatctaattccagatgttacttttgaaagatattaatttctaaggtgttaattttgcatttttgtgaaaataacatacacttcatgaatctaactgctaatttaacagctctgtgtggatgtctagtgggtatttcaaacatcctaagttcaacactgagctcttgttcttttcctctgagccagctccttccatcatgagttcccatttcgggaaatgacaactacatctttctggtttttctggccagaaattttggtatcatcattgattcttctttttctcttatgcttcacccttaggccccaggtctgatcaaccattgccacctttactgcaaccagtttaccaaatgaccgtcctttctcatctggattaacaagatggcctcctgagtggtctcccggcttcagcacttgtagcccagttgcatcagggttgagtgcggagtgaggtagtgaagtcagaacttatcaaacttttgctaaaatttccccattggcttccattgtcccttataagtccagggtcccataagacttcttcctcttactttttaccctcatctgtcatcccccgcactcactgcacttcatccaccctggtgtcactgctggtcttagaacacagtggactgactcccacatcagcgactttgtacttgcttttcctgctgtcaggaaacctgagtgcatgactctcttcatcagctgcttccctttcttactcagataccccgttctcaacgaggcctttttaaaacaatcttccttgttgaaaattgccacttcttccccagatttcttttttcctcttcttccttttattttttctatagcattatcattacattatataaaggtgtttctgttattattctgtatgtgtcttcctgaaaaaaaaaatctgtgaaatcataaaccaaaataacacaacttatgaaaaaagttatgtacaacactgaaaaaagtgttatgtacaaaccttcaaaaatctatggaattttgcaatcaggacactaataaagaaataatactactagtaactttcttcattgatttgctgttttgataaaaagagaaagggcttccaagatgcaccttcaacttctctcaatagtgtaatgtcatagaaagtgaagtggtttgtgaagcccctaaactggccactagtcactacctgcactacacaaaggaaggccctttttttttttagtttttaaaattgtaatttgttgtgctgctgctgctgatcatttccttttattttaaggctcacctttgggttcagtgataaagcttgttcataagcaccttagatccttaatattccagggggaaatcatacataaatcactacaacttctgtgttatacaaatatcagttcctatctctcaaccacatatgaagtaatttgaataaaagaaatatgtgcgttagtaaaaccgactatactatatattttctttgtttcctgtttatctccctaaactagaagataagctccatgaaggtgtgatcctattctgtgttcctttttcaaaattctcatttgtgttcccatttcatagacgtttactaggtatttaagaaatatttgttgaatgacagagcaaataatcaaaccaatatctagacttctctagaattctgaagtaattgaaagtatgaatgctttcttttctttaaattgaacaacttctttggcttaatagttagtgacatttaagacggtggcctgatttatgtgtgttatttagaaagccaaaagtaaatgtgttgtggatgaagttcaagatccagcattctgtaggaagatgcaatttcattctgtgacaacatgttttaataggaactaacacgtagattgtgcttttctagcaggtgctggcgtaagcattctgcacacattgggtaatttaatccttgagacaagtctagagcagcagttcccaaagtgtggttcaagaacctgtggcagaccctgagcccctttgcagggggcggccacaaggccaaaatcatttcatcagaatagacctttgtactttgtccccttgttgagcttttggcaacgatttaaaagcagtcgtgagaaaacttctggcacctgagcgcgtatcccgaggcagtggtgccaaactacaccagctggtgtgttactcatccgtgccacacacctatgagtaaaaaccaaaatctagctctctcaaaaatagccttaaagtagtaaaaattattaattctattaagctttgactcaaataaaattattaaaatattctgtgtcgaaatgtgaattacatataaactcttctgctgtacgccaaaatgtgccggttgtctcaaggcaaaggatttgggaggttgtccgagctgggagttgaactggctgcttttttgcatggcaccccatttttacttgaagtagtgactgacagaaaaactatggtaatttagacttgggtattttgcaggattttcttgaaaatgaagaaaataagcttgttgcatcaatgaaaacaactgacagtatttgtggctaaagataaaaattgagctcataagtaaaaattagcattttggaaaccttgaatatgcccaccatgagcttgacactttcgcattatttaaggaggtgtctgatgagataggtagctgtgttaatttgtgatattttttacattgtataatgaaacgtgtcaacgtttggaaggtctgcatcactcagcgaaccaggaaagacatgtgtatggataagatccattccaagtacaggacagtctgaaagatgttaatgtaacaaagcaccaaagtgtcatttatgcggtttcagagtccgcgttgcaactaacctttatgaaactgacacttgtttagttttactaaagtattaacaaaaatattcacagctgtttgaaaaggcaattaaaatactcccctcctttccagccatgtatctgggaggctgtatgttattaatatccttcaactgaaacaacatattacaagagactaaatgcagaagcaggtgtgagaatctagttgtcctttattaagctagacactggaaaaatttgaaaaagggttaaacagtgccactcttaagaatttttagttttcttttggataatatagttatttttcataaatgtcttttgtattaataatgtaatgactttgattttttaaggaattaataactttttaaagttcacaggtttactctctaatatgataaatacagaaagaaataagtcacataaacaagaatttaggtgtccttaatttttttgtatgttgcaaagggatcctgagaccaaaaactttgagaactgctgctcttgaagaagttggtgctattgctttgttgattgagaaacccagacataggggttaagtagattgtccaagatcacagagctagtcaggggagagctgggatttttctttttctttttctttttttgagacagagtctcactctgttgcccaggctggagcgcagtggtgtgatctctgctcactgcaatctctgcttcccggtttcaaacgattctcctgcctcagcctcccaagtagctgggattacaggcacgtgccaccatacccggctaattttttgtattttcagtagagatggggtttcactgtgtttgccaggatggtctcgatttcctgatcttatgatctgtccacctcagcctcccaaagtgctgggattataggcgtaagctacggtgcccagcctccccaccccccgccacccaagacagagtctcactcccttacccaggctagagtgcagtggcacgatcttggctcactgcaacctttgcctcctgggttcaagcgattctcctgcctcagactcacaggtagctgggaccacacgcacacaccatcatgcccagctaatttttgtgtttttagtagagatggggtcttgccgtgttggccagactggtctcaaactcctgacctcaggtgatccgcccacctcagcctcccaaagtgctgggatcataggcaggagccatcatacctggcatagagctgggatttgaacccagggctccaaagtacttgctctaaactcaaatcacatattattacttcttgagaaacctccatggtttgtaactttgctaaaatcaataagctttggttggacttagatgtcctttcaagttattttctcatgtaatttcttgatataaaattaaaccttcaccatgtggatatctgttacatctcagtttttatggcagtacatatttgccgtaaactcaccagcaaacagataagcaggagaaggtaaatcatatttgagattcttttcttggacctttcagttttttatttaatcagggttgatttcttaagattattcgaaagaatctttgaaagaaatattgtgccatattcaagaataatgttggttatttctgataaccttactcttattttggttggtcatactttttcactacaaaccatagaaatgacagttcagtatacttctactttgaagtaaaatattggagagctggaagcttatttcagtttggagaaacgggaattgtatttatcccactgtgtcttattaatttatatactgaaatagattagcacagtgcaagataaaactagtacataaatatagccatatatgtttctaccatcagcttcaattgtggattaatctcactggaagcttgaatggtttcttaggggaaaatattggaagggtaggtttacccccagagttcccttaaatatggtgttaatttgcattgatttcagagaaaacagagaatcagtttgacttccccactggctgactgcataggcaaactattcacagtgctgtttaatggaaatctcagggaccctcctgctttctctgttttcacatggactgactcaaatatggagaggacaccagggacaaattacttggagaaaatcccacacttgttagtcagatttttgagtacaaaatgatgactttgtggtgagatcaaggaatacgcagcacaatctttgacttgtgttagtttttttgtttgaaataagagatatattctttcaattgtagctgcctttcatcctgaaatgtctgacatttattttacaaggcagtagtagagagagataaggtaaaatacagagaagttgggtgggtaatttatttatttattttttagattgacagaagatgatggtacatctaagtatatttgaaagtctaccactgggaagtatttagaaatatttatgataagctaaagaaacaaagcctgggaatttgctgtgataatagagccaactcttttcactggagggagaattacatagtttgggaattagtatgtaccattcgtttatgtcctttttctcctttctcctcctgctcttcctcctcttgcaccgccgcctctagttcacatttaataaccaaacgacttacttgggtggtgacaaaaagggcagcctgaactgccctgtcctcactgccttttctcagcttagcagatagaggactttgtcctaaaacaatcataggtctctttttcgtgtaatgccttcttttcctctgggtagatacccaggagtgggattgctagatgaaagggtagttctactttcagttctttagggaatcttcacactgttttccatagtggtcgtgctagtttacattcctagcagcagtgtaaaagtgttcccttttcaccacgtccctgccaacatctattattttttgatttttgaaaaattatggctattgatcaggaaaatgcaaatcgaaaccacaatgctatgcctccttactccggcaaaaatggccataatgaaaaaatcaaaaaataatagatgattgtggtgatggggtgaaaagggaacacttttacactggtggtgagaatgtaaattagtacgaccatggaatactattcagctctgaaaaggagtgaaataatggcattcacagctacctggctggaactggagaccattattctaagtgaagtaactggggaatggaaaaccaaacattgtatcttctcactcctaagtgggagctaagctgtgaggatgcctaagaatgatacaatggactttggggacttgtgggaaagggtgggacgggggtgagggatacgactacacattgggtacagtgtacactgctcaggtgatgagtgtaccaaaatctcacaaatcaccactaaagaacttactcgtgtaaccaaacaccacctattccccaaacacctatggaaataaaaaaattaaaaatcctatcataggatcctcttacagcatcataatgtggacctgtctatatttgcatatttaactagagtggcacatatctagttatctatttaaacctcaccccagaagtacatttgaaaatcataattgttgtccttaaaaagattgatattactattatgaagaaagcacattgcactgtgagattaaattcctggcttcaataggtatacataatgaactgccagcagctgaaatttgaatgactacacttaccagaaaaggatcttctacccacatttctcagaatagttgttcacaaatgatacattctgccctgtgcttttgtttctccctggaatttgaaaaataaaacttttcgctcatggtaaattcataagcttggggcatgaaaatgtttgaatttgatataaaagaagttttgaaaggaagattagtggtttaaactgaaagattagtcgccctgggaaattcagctgtggcaaaagcggagttcagtaataacctgccctggctgattactccattcacactggcattctggtcctcccggctggactcgcacctgattgacggtgctgattatgatggcttaatacagctcatcgtcacttcaccgggacacgtggactttgtgggcttcacagactaccccccaccccccttgtttgtggtacagttgattcttctgctaagtggaggttgattatttctttattcattatctctttaaaatgcaggagaaaagggcaaattatcaaataggtgatgattatcctagtggaagctctcttgggcagagtcaaaagaagaacttgcagttcaacttgcttgatacctcatagttgattcctattcattctgccgttgaagggtttcagatgatacgacttaattttagctgttgtggaacagcaatgaaaatccatcgcaagaccccctttcttgatgttagggaagccgggggacgcaggatgaggtagtaggctccagctgctgcccatgtgaatgatttttcctctgcagatagatgggtcatggtccctttctagatgagcagaagattattctcacattggagaggtaacattaaatacatttacattggatctgaaaaccttaaatgtttacttagggaagtgtcatcttcacataaaattatgatgttgtgtaagccttcctttttctccacaacctctccagcacctcttattttttggcttttgagttacaggcattctaactggtagcttattttggttttgatttgcatttctctaatggtgggagtgtaaattagttcagccattgtggaagacagtgtggtgattcctcaaagacctaaagacagaaataccgtttgacccagcaattacatcactgggtatacacccagaggaatataaatcgttctattatagagacacaaagacacatatgttcccaatagcaatgacatggaatcaacccaaatacccatcaatgatagactggataaagaaaatgtggtacatatacaccatggaatactacgcagccataaaaactatgcagatcatgtcctttgcagggagatggatggagctggaggccatcattagcaaactaacacaggaacagaaaaccaaataccacatgttctcctcctataagtgggaggtaaatgatgagaacacatggacacagagaggggaacaacacacattgagtcctgttggagcgtggaggatgagagcggggagaggatcaggaagagtaacaatggatactaggcttaatacctgggtgatgaaataatctgtacaacaaacccccatagcacaagtttacctatgtaacaaacctgcacatcctgctgaacctgaacttaaaagttaaaaattatgatgttgtcttgagacaatgttaagtctattcctgtcctttgggcagaccttaaacctatattatccacacagatgagactctctctttcataaatgatttatgttctattttaagaatagaacactttctatatgaaaatggaaatttcacttttccttagtaatttattctagggtcttctaatgttcgttgttagaatacagaagtattcctaacgtctgctcattttcctgaggaagggaatgtctattattatttgaaatacacacacacccttcaaagattaatatgtgggccattggcttttccccaggtcagagttttataactttaccttagaggcaactcaatcattttctttatgaatcatttcaggatgttctctttcccatttaaagtatgtaaagatcaaatgcttttgcagggcatctgtgcagacttgaatactgatccttctttctccctttctgtccccaaagttttgtgttttgttaccttaatgccctcttttaacttgtttacctactgtatgtatttcaatggtaaatagtgctgggctcagagaagtgctattccccaccttggctaatctatgtcaaaatacgtgtcgttatgattttaatttgaacgcttaaaattccagggtgttgacatattttcccttcccttctccttataatgaatgttagtgtctgtgctaaccataattttacggccatttggatctcgagatatttgcttgccagctatatgaaaccattctttaaaatgagctttttttttcctaccagctcacagtatccagccttataatttgtacatggtataggcatgtttgtttaactataaagtccatgaaaaattgagttgtagtatcattttaattcaaatccgttgtatactatattaaaatgatgatgctctatcaatagcaaaaccaaattcagatttttgagtttctatctcgaagcttttccctttcgaaaagatgtatgttttctatgactcattcgtgtaggacactggaaccatatgaagtggcatttctttttctgttgttaaacagagtgcaaatggccagacattaataaagcctgtagctcagtaaatcccacaggatcaaagctacctccattgcagttcagctttattagactgtttgggtaataagaggagatgatttttgctgaagtacataggaaaaaggaaattggacacatggctacattcaaatttaagaatgcagttgatatacagcttaacgcatgtcagttgcagcagaagcaggcagaactcttggaacaggacaaggctcgacaactcctgactttgagttacatgtgctgtcacagcatctaacactttactgcttacattcctgcatcagacctagattataagcgcttaagggacagcgactgtgtcttacactttgtattctcaatgctgattacagaggctggtacatagcatcagtgcatgtttattgaacagaaagttgtacaagtcagagacataagaatccttcttgacatctccctctccctcacatccataaccaatctatcactgaatctttttcccacctaactattgctttaaagcggatcactgcagtggcctctggactggtgtcctcccactattccacgccctctttttttccttctcacattacagccagaatgttcttttaacaacacaatcacacaacctcttcaaaggctttttgctgtctttttttttttttctgagacagggtcttggtctgtcacccacactgccaggctggagtgcagtggcacaatcacggctcactgcagccttgacttccttgggtcaagtaatccctccacctcagcttccttagtagctgggactgcaggtgtatatcaccacactggctaattttttaaaaaactttttgtggagatggggtctcactgtgttgtccaagctggtcttgcactcgagctcaagcaatccttccgcctcagcctcccaaagtgttgggattataggcataagccaccacaactggctgtccttttgtagtaagagctaatcatcatcatcatcatcattatcatattgacagtactttttacaaggttataaatagggtgatcacacacgttgttaatactcggacacttgaatgtgaggtgggcagcatggacagtcacgcaacgatgaggtgggaaccagaacacgtgtggccctgcctgcaaggccctgcacaacctggccctgctcatcccacttccagtcactctctttgcacctgcagaaagtcttgctgttcactctttcgtactgcccaagggtactcgccatgtttgctcccaccagagggcctgcttaacggtttggagtgctgccaacacttttgttctcagctcctgcatttcatctcatcgactaggttaaatctcctactgtaagttcttgccgtactcatagatgcaatttaatatttatttatttgaatgaataaatgaataaatacttgtgagaggttggtaatattgtattactaatataccaattatgatggaatatagtgatcaacaaaatgacaaaataacctatgtatttatatttaaattctatatattcagtttatacactatagtttaatgtgcaactagtttcagtgttaacatttctaatgtgctacttgatgtttattaaatgtacagtagtttataagaacagcttagtaatgtcacaaataaattaccaaaaatttaaagttgagtatgacttcttgaaaagaaattttccgtattaaggaaatatgtgacatttggagtcaaaatatatagaattggtagattctggagctagattatctggatttaaatcatgacttcactgcctactgactgggtagcattgagcaagttatttaacttctccatgcttctgtttattcattcttaaaatgggtataatgatgacatctatgttatagggcttttgtgagaaataggttaatatatatataaggcatttagaatggtttccagcacaaagtaaataataaatactagctattgctgatattagtgttattatatttattcattcaacagatatttattagctatccccttagttcctggcattgttctaggtgctaggaattcagaagtgatcaagactaatgtactgtagagtaacctacaaacactttaatttcagtatctgataactattgtaaatggaataaacataatgacttgttagagcatattgtgcaggaggagctttagttaacctgaaggatgagcaaagatgagcatgcacagagcatcctaggtagaggaaagaccaagtgggaaggccccacagtaggtgtctcactccgttttctgctgctgtaacagactgggtgattcaaaaatgatggaagtatatttgactcttggttctagaggctggacagttcaacaacatggcagttcatctggggaggccctttgtgctatatcatcctgtcatggaagtcagaaggtcaagggagtgcatgagacagaggatgggggcccaacttaccctttttattaggacccctctcccttgataactaactccctcccacagtatcagcattaatccattcctgaaggtagagcctgcatgacctaatcatatcctcaaggtcctgcctcttattactgttagaatggccatcacatttcatcatgagttttggaggggacattcagaccgtaactctaggaaagagcttggcttgggtttaaatgtgcaagaagtgaagtgtgcctggagtgctcggtgtgagcagagaggggaggaggcctgaatgaaagttagaaagctgattatgcaggtggatcttggggacttttgtagaaaaatgacgagtcatataatcctgtttattttgctgataaagaaacaaaaacctgtaagtcctgatgaggatcaggtagctaattagtgatgctacagctagaagccaagtgtgctgcatccatattaaaaaatgttattgaaacagatctacaaaacattgacaaatcatatctagtattctctccattttcacaaagtaaatgtacctttgtaaccacatcaggaaataaattttgacctgcttttcataagccatcccattaccttcacccccgtcgctatcccatccctcagaggtaacccttatccttaacctctgacaccatagattagttttatctggctgtgaacttttatgaacttttgaatagtagcacatgctataagcttttttgaaaattctgtctggcttctttcactcggcttgatgtgtgtgggatttacctgtgttgctatgtgtagcaattgttgctgcattctcgctgcagtgcgctgttccattatgtgaatataccatgagtttcctgtgttgtatcccattgaaagtcaccaggagagaccatttccacgtgtgtatgaaaggaaagctaggttgcgattcatgtcgtttatgtatgtatgtcaatcttgcttatcttacttttttaaaaccaattgaaggttatagaggaaacttctcttttatagcctgcatacacttgactgttttctcgcaaatagattgcctagttaaaaccaaaagcttgtatgtacagggattgtccgatatgtcccttcaataagctattaaccataagtggaaataacttggatgaacctgtcagatgctttcaaatgcgggtatcattgagctttcagctttttgaaatattatctggggtattgcatgtttccagggtttggtaaaggattatttacttcttaattgggccaaacagccatcactttcattttaatattacgtttgtttaaataatagatttattaaattagatgagtgccactttcatgcgtacttcagttttgttttgttttgttttttaatatttcagatgatgttgctccatattttaaaacggagccaggcctaccacagatccacctggaagggaaccgccttgttctcacctgccttgccgaagggagctggcctttggagttcaagtggatgcgcgatgacagtgagctcaccacctacagcagcgaatataagtaattgatcgcttgaaaaaataagatcccatttcagttgatgtgtttggaatacttgccttactggtcataatagcacaatgagtgaaaatattggattgaatttctaatgcattcaagattaaaggaatagatttgaatatgtaattagaatgtgatttactattctgatataggttgtacttacacctaggaagtctatcattatatttgtaaaagtaagcccattagtgaaattatcagtcaacaaaaacctatggttacagagcaatgccaataacagctttggtatgatacatttactttccaagggcaacagccctacccacaagtattgctcctgtctaggcacaaatgtttaaacagatctttagtatggtagcttctggagctctgagtagtcagcaaaagtctttcctagctgttttcaagtggagatagggatggatggaatcatggagaatgggcatgcatacagcctgtatattcagcagcaataaaacagtatatattgaagtcctgccatgtgcccagcactgtgccagtcaccagggatctgatgcactggggtggacatgatgtggggacagagggcctgaacctgtggcagagcacaagatcagggtaagactgaggtgtagattcacctggaggcagtagcacagcctttggagcctcagggtcttaccacgcttcagagctttccaggggtatacttttgaggatgataatattacatgctgcagttctgtgcaggatggagaactagcatgccagaaaagtccaggaggcctcaccatcagcaaatcagcaaaatcatcgctgccatgcttttctttagatgaaataagaaagagtgggctgtatagaggcattttaagtggaataacaagcttctcaaatggggaatagcccacccactcactctctttacctctgaggttgtgatacggtggtccgtggaaccacactcagcctgcccagaatttatgtgtgtgtcagttgtctgtgtgtttgtattttaaaaatcaattaaaaaaaatatgagaatgcttacagcattttttttttttttaatttgagacggagtttcactcttgttgcccaggctggagtgcagtggcgcgatcttggctcactgcaacctccaccttctgggttcaaatgattctcctgcctcagcctcccaagtagctggttctacaggcgtgagccaccacacctggctaatttttgtatttttagtagagatggggtttcaccatgttgaccaggcttgtctcaaactcctgacctcaggtgatctgcctgccttggcctgccagattgctgggattacaggtgtgagccacagcatatttttttattagctgccaacatttgacagttctaagattttctgtaaaaaccttgcttcccagcctctgcagaccagtcagaaggcctggctgcctggtctgcagccccaatcaggagcaggcggctgagcagagctgcccccatcaaaggcatggacactccctggttctcctcggtgctctctggcagccccgtcccttgtagcacctcacttgctctccccattcccattacccacccacactttagacaagtgagtgtgtgactgcttacattattgggcctaccctgttggaggatctacactcgaggaaaagtttatcatagtagatcatagcatgttgaaatcaaacagtcctgaatcctaggactggcagaattcagctccaccacacctgagcaatggtgttataactttaggcaggtgacccatgagccctcccctcccgtaagtgaaaagagagtgacgtaagcgtttgcaaaatgggaaagatccctcctcatttgcagtgttgtgagcattgaaggctctagtgatcgtaggcagcattatacattattaccatgtgacattgtaaggctcagtttgttagaaggggtgtaagaaagcagaaacagaaaaagtgaacttagagttgagaaccatgtttgagtagtgactgataacagaagactggagttcagggacttgctcttcaacttaccggtgtgactttggacaagttatctaatgttgatctttttccattggaaaaatgagtacagtaaggcccacatcaccctcatttttatgagagttctcttaaaaattaaattacatagtgctttgtatgccccagaaagaaaggaatggagtttcaaagaacccagattgttcttcctaataagaagtaggcatgatgtggacagtgtgtgacagtggcctggtggccaggctacacgccttggatggcgggaaaggaattgtttcctagatcttcagtttccacatggatgttttctgaaactgaattccccaagaacaggcctttgtgtaggcaccaagccatttctcttttccgaccacctgtaatagtggtttctcctccatcccaggagaaagcgcacctgtaccttatctgagtcttcctgtggaactctctctggggggtgcaagagtaagacagagtaatatcaaagttcccactattaaagaattcttttgatttttaaatggataatatgggtctcaaactattatttgcaaatcgttgaatatacagagggtccccaacttacgatggttcaacttaacaattttttgactttacgcagttgagaaacccttctgttttttactttatagtatttaataagtcacatgagatattcaacagtttattataaagcaggctttgtgttggatgattttgcccatttgtaggctgatattagtgttcggagcatgcttaatataggctaggctaaaccgtggtgtctatgagggtaggtatgttaaatgcatttttgacctagggtattttcaacatacgctaagtttattgggacataacaccttcataaggctagcagcatttcaatttaaaacaattttgtaggcccggcgcagtggctcacacctgtaatctcagcactttgggagggtgaggcaggcggatcatttgaggtcaggagttcgacaccaccagcctggcaaacatggtgaaaccccatctctactaaaaatacaaaaattagccaggcatggtggcgcatgcctgtaatcccagctacttgggaggctgaggcaggagaatcgcttgagcccaggaggcagaggttgcagtgagccaggatcgcaccactgcactccagcctgggctacagagtgagactccatctccaaaaacaaaattttaaaaaaatggtgtaacggctttattttaaatgccaaagtgtacaaaaaactgttatatatgcaacctttcagaattataagacaacttgcagtcaacttaaaactgcaggaagaggtggaacactctttgtattcttaagagcccttgcatatgtatttgttcattggaaacacaagaagacaaaacgttgttggttgtattgaagcaagattgagggagtgactcgttatatgtggactattaaaataagctatgtgcttcactactatgacatgggaaacgtaaggaggaatgggtgattctgaagcaagaattgtttggggtatttgtgataaattatattatgttccacgagggcctcagacacttagatgggttatcaggaatctatcatagcttgcttttttttttccccatgatataaaacctgtctaaaaatctcatactattttttcaaattactctttcatctacttccttccagtaagcatgttcatttatcatatgttagccttcatgagacctttgtaagtttcaaatgaaaaaaacatggatactttatgaaaaaggtagttgtttcccaccttaacaggacccttatttttccccactttggtgtcagttatgaaaatgctaaccctgtaaagagcaaatactacacatttactttttctagctttgacttaaaataacattttctttgctgtgtgcgttacacactgcacagtgaatttcaagtgttgtatttcttttttttttttttttttttgatgtggaatctcactctgttgcccaggctgatgtgcagtggagcgatctcggctcactgcaaccttcgtctcctggtctcaagcgattgtcagcctcctgcgtagctgggactacaggcatgtgtcaccacgcctggctaatttttttattattagtagagaaggggtttcaccatgatggccaggctggtctcacactcctgacctcaagtgatctgcctgtctcagcctcccaaagtgctgggattacaggtgtgagccgctgcacccggcctcaaatgttacatttcatattgatgctcatgtctacattttggtggcacaggtgactacattagcaagttgacggtaattcagcaattaaactaagtttgcatagatatcttaggtggatttgtattctttccagaaagcatttagtctaaattattttctactttggaatgaaaaaatcttttctaattatattcaacatatacatacacctaagccgagaatttcttaatgctaggcacaatatttattattgtaacagaaggaataattgtatactctaaactcctaaaaattttatagttttcttatgtaacctgcctctgtggttcaatttctatgacaatataaaaatagaaatttgatggatgtttattcttgctttattccagggaaaataagaatggttaagggaaaggttatttttttcttttgttttataaaaaggcaaacatttcacagtatcaataaaaattatgaaatacctgggaataagttttataagaaatgagtagaacccacgtggaaagtgcgtaatgagatataaaagatgatacttatgtaggaaacccacttgctataaaaattacagttcctttgaagccatcatagaattttagcctaacatcagtagaacttttcagaaagctaatatcaatagctgattttattttgctgagatagggtctcactctgttgcccaggctggagtgcaagtggcctgatcatggcttacttcagattcagcctcctgggctcaagcagtcctcctgcctcagcctctcaagtagctgggaccatgggacccaccagcacacctggctaagttttctattttttgtgcagatggggttgcactgtgttgcctaggctggtctcaaactcctggcctcaagtgatctgccagccttgacctcccaaagtactgggattacaggtgtaagccaccacacctggcctggatattttaataaaaaatgccaatgggattttctggggaagtaactgatgaagtttttctaaagctcatctagaaatgtaaacagaagaataccaacaaattttcacaacattaagtgaataatggggaggaacttttttttctaaaacccaaggcatattagaatgccataataagtaacatgttaatagtataaaattaaacaatatgccagaggagcattttgaaccagaccattatatttataaaaaatatatgatcaaggccaggcatggtggctcacacctgtaatcccagcactttgggaggccgagggaggcgcatcacctgaggtcaggagtttgagaccagcctgaccaacatggagaaaccccatctctactaaaaatacaaaattagctggttgtcgtggtgcatgcctgtaatcccagctactcgggaggcaggagaatcccttgaacccgggaggcggaggttgcagtaagccaagatcatgccattgcactccagcctgggcaacaagagcaaaactctgtctcaaaaataaaaattaaattatatatatattcaaatgagttctcaaaccaatgctaaaaacaactttttgcaaacattcaaaatagatcctcattaaacatcaaaataaattttagatacaatgaacaattaaatataaaaaaatggaaacataaacaaagggaatatttgaatgatctcagattataccaggagaaagtacaaaagcattgagaaacttcatcagaaaccgatcacagataaatttacaaatatttacaagttttgtataaaagatacaaaatttttaattgcccatttgcttaatcttataagttaaaaggtaagcaacaaactgggacaatatttgcaacaaatcagacagttctgtctctaataacttgggatctcctgatgacagtggtggagacaaagcttggctctccttctttgtttgtgaatgtcatcccaggaagcaggtgtaaaggcaggggaatgaagcagggaggaaggaagcaccagtgcagggatcccttatcaagttggcagtcactctaagtggctggagctcaatcttgtttgcaacgtctatggagtcttatgaaatgcatctcagaagtgcccactctaatgggtgaaagaggaaattatttatcagctcctgtacttggctgataaatatgggtcccatggttattagccttcatttctaattagctcaagcattggtaagcagctaaacctgctggctgtggtgccagagaatccccaggacaggaagcaagaaataggaggcatgggttgaggcaaagtgatgccagctgcgccaccataaagctactcagggctgcctggaagtgttgaccacagcagcagctcaagtaaaaggtagagccagaaggatttttctttctttcttttctttctttttttttttttttttgagggagagggtctcactctgtcacccaggctggactgtagtagtgtaatcatagctcattgcagcctggaactcctagactgaagtgatccttctgcaccagcctccctagtagctgggatcacaaatgggtgccaccacaactagctatttttttttttttagacacagggtcttgctatgttgcccagcctagtcttgaactcctggtctcaagcagtcctcctgccttggtctcccaaagtgctgaggttacaggtgtgagccaccacttccagaccgaaaggatttttaaaatagagagtaagaggacaaaattgagtctattccttgaacccctcagtgtaacttgtacctgctgttaagtctaattcatgaaagagtcccttctaagaagatagtcagctatagtttctaacaaggactttattcaagagagttagtagaacaagctatttttcttactggaccaagtctcaaggctataattggtatttatgttctcctgcccattttaggtatgcataactctcagcctgctcttcagctagtcgaatttgcttggtgctgggtggcccaggccctcatctcaccttttagttgccttgcctttgtagggccatggattctctaattacaactggtcttgcgagtactaagagataccccattgacttctctcctcctcacctctgctgtgtggcaccagccctagtgtcttagagtgattagagtcatttacctccatcagtgtagtaacgcctttctttttcaccagcccactggcatgaagttcacaaagtgagtaggatgaattagagtcaaattctctgggtccctttttcttctataggaaatctcccccactgagaactcagatctgtaatccaaaagagcctaaagttgggaaaaaaacaaatagatggccagaataggggccaatcatatcttgacctcaggttcaacaatttttttttttttattttgagacggggtcttgctttgttgcccacgctggagtacagtggcacagtcatagttcattgcagcctcgacctcccgggctcagttcatactcccacctcagcttcccacgtagctaggggtacaggcacacaccaccatgcccagctaattcttttatttttctgtagacacagggtttcactatgttgccgaggctcgtctcaaactcctgggctcaaatgattcacccagcttgtcctccccaagtgctgagattacaggcgtgagctgccatgtccagccaacactaccaggcattgttccgaatcctattatcctattagtgtggctacttccaggtgatgtaatagctactaggactaccggatcctctggggaaagtgcctgttttcatacctccttcaataagtacaatgagtccctgatctgggacaattctgtgcaggctgccacgtgtataggaggtattcatgcttccagattgcggtgctggcctagtcaatgagcagagaaggcagatccatatccagaggagatcctgagtttgattaggaagagtcactgcatgtttccgtggtagaaaggtcaaatataagcatccagtcccaagtggccagcttgaagaattgtgtcgcactgagggctcagcatcagtctctgccgttgccacgtttggcatctggcattggcaaaagctagattagctttggtgaggaggagctgttgcttttggattcattcatagcctcagtccttgccaacatgaccgattgatgtcccattttattagttgagaagaaatctaaatgacacccacagttgagtcatcctcttcaactgatcgatgagtgccttatctgaagtggatgctctctagtgatataaaaaatccacatattacacccacccccattgggctatttacatatgactttcttgtttctgaatttccagtcctgtttctcccaggcctctttcccatcagccaagccatttgttactgcccaagtgtctctttatatccattctcaagccatttctttctcaaatctctccctattcaaagttaaggaccaaaggtactacttgcagctccgtctgcttggaaggctcttccttaactgcgctccctttggccacgcatgagtaaggccatagtgtgacatcttcattttccggatcaagttgactcatgtataatcccaggcctgagtgtttaactgttctatcaattggtgaggcctgtgtataactgagacagtagtcttactcttgtggctacatagttctgttaataattccctcataatgcttatctccagttgcatattttctttctttcaagatagaatcttgctctgttgcttaggctagagtatatatatatgtatatacaaaatatatatattttgtagagatgggatctcactgtgttcccaggctggcatattttcttaatacctatggggtcaggacttcagtttgtcctaaggacatcagtgtatgtagttcccttctgcagaaggcatgatcttattccaggaccttatggatgcatgtttgactcttctttggggctactagagactccccacaacatccttatccacaacagatatctctggcaacattctatatgctgggatacgtggcttatgtgaaagggcagcttctagaactattgtctaattctatggctgagtcctgtcttcctctttgtctccctaaaaactggcaacctgggtcaagataaagtaactgggatctgatttactgcctcatttgaaacaactgtaaaactggacaaaaatatgaacagttgttttcaagacattggatatcaggcagtgaaagattgtgatcgctgagagatggaagacaaacaaggtgagccctatgtttgccctctgcttactgccttgaggggatttctaggctgtggcacagagaaggaaaacccaggcagaacctagaggaccttctgagttgaagagagctgagagtttggaaagatcaaggcagctagatttcttagggcagggtactggataagagagcactacaggccaagcgcagtggctcacacctataatcccagcactttgggaggcggagacgggcagatcacgaggtcaggtgattgagaccatcctggctaacatggtgaaaccccgtctctactaaaaatgcaaaaaaaaaaaaaaattagccgggcatggtggcgggcgcctgtagtcccatctactcgggaggctgaggcaggagaatggtgtgaacccaggaggcagagcttgcagtgagctgagatctcgccactgcactccagcctgggagacagtacaattctcagtctcaaaaaaaaaaagaaaaaaaagaaaaaaaagaaaaaagcactacacagagaaagaatgctggaatcctccagagggtccccctttaatatttggcagaatattcgtcagcacattcatgtgagaaaactaccccaggcaagggaaaggactatccaagaagattagaggcaatagttccctgtgcttacacaggactcggcggagtgtctgttctcaccagccaaatcgtaaaacctcatattcatgagtttatcagatagcctgcacagaggtgtcttgggtcaggagaatgattagccctagaccaaatactgctctggttctgcctaacaagtcttgaaaagcaagatccaaaaggatcaaactgttgctcaatatcttcacagtatcagagaacaaagttaatgaatatttataggaatgcaaaaatttccagtacccaacaagggaaaattcacagtgtctagaatctaatcaaagatcatcaagcatatgcagatgcaggaaagcatgacccataatcaggagagaaatcagttgattgaaaccaagccagaactgacacagttattagagttaacagagaaagataatgaaacagttataactgtattgcatatgatcaaagtagagacacgaaaaacacaaaaaaggcagaaatctaacttataaggatgaaaactataatgtgtgagataaacattggatgggaccatcaggaaactagacatcacagaagaagatattaataaagctatagtgatagaactatccaaaataaaaggcagatagaaaaaaaatcaaacataatgaaaagggcacaaatgagttgtgggaaagcttcagatggcctaatagatgtgtagttggaatcccccaaggaggcagtcagaggaaaaatatttgaagaaataattttttcaaatttgcaaatcccaattactggagttaccagccagtgcaataaggcaagaaaaagaaataaaaggcatccagattgtaaagaaagaagtaaaactgtattttcaagttacatgatcatttatgtagaaaatatatacttttaaaaagctgctgataagtgagtttagcaacattacaagatagaagatcaacatataagaattaattatatttctgtgtactagcaaacaaatctgaaaattacatatttaaaaatttaaggtaggatgggcatggtggtgcatgcctataatcccagttagttgggaggttgaggcaggagaatcccttgaacccaggaggcagagattgcagtgagccgagattgtgccattgccctccagcttgggtgacagagcaagactccatctcaagaagaaaaaaatttaagatagtacaaaaaaatctgaagtaaggataaatctgacacagggtctgtaaggtctttacactgaaaactacaaaacaatgctgaaagagagaagaaaaagaagacctaaatcaatgggcagatacactgtgtttatatatctgaaggcttagtattattaacagatccattttttccaaacttatcccttggtgatattctttaggcccgagaccctgagacaaattacataactaaaatctaaaattcatcactaagctgtggggaagatttctctacaagatttttttttgtttttggagacagggtgtcactttgttgcccaggttggagtgcagtggtgcaatggttcactccagcttctgccaccccagctcaagtgatccccccatctcagcctcccaagtagcttgggactacaggcacatgctgccacgcctggttaatttttgtatttttaatacagacagggtttcaccatgttgcccaggctggtctcgaacttctgggctcaagcgatccacccaccttggcctcccaaagtgctgggattacagatgtgagccaccacactcagcttctaatgctttctgttttattttcttttaatctattgagctctctctgtactcaccaagaagaaagtctattatatttaattgagaactcttttctcagttggtttcctcatcacccaacctaattgtgtgtaactcccatctacatcttcgtgaaaagggcttaatttctctagttgtccatcttgatgttcagctttcattttcctaaacttggtttatgtcagctctctttttctagttaactcctctttgctcctgtcctctatgaattgcctagctttcaacagcaaggacagcaggtgctatcttatttaatttagatccataatattaatgcggtgtgacctcatgttcatattctccccacaaagttgagtgtttttgtatttctggcttcagtttgactgctttttggaactctgtatggtcataacagatatgaatgtttatggagaatctctgaggcagaattagcattaggctttttaaggttctcattggtaaatgatttggatttagataattattggttctttgtttagggatcattgtggaagctaagtgaagaccttgccagaattgaccaaactactctgtaacataattcattgttgacaaatactcccgagtgagacaagtgggagcttttaaaatttatatttttaatttgcttatgcttataatgtttaatagagtggtttaggtcttttttccattatgcgttggaatggatttttttgattatgtagaaactaacatttgccttcatactttaatccttgatataatggtccccaacttttatgttcatagagaacctggcattataaagaattaagtcaacagacatgcaataaaagatttttatccctaagaaaaggcaatgtcctctttcctgaaggttttctgaaattccttttttaccgacttgagagagcaattaatgctcacagtagatttgacagacggttctagtcatctgtgcttcactaaatatggattgcacattttctgcccctgatttaataaggaaaagtaggaatgaatgacgaatgcataatccccaaagcattgtttattttagagaaaatcacataaacgggaatcccagaggaggagtcttgggaacatttcaacattaattcttaggtctttggattggctttcataactattaatgaagataaagtttaaatgtagtcattcatggtatggcatcaataaaaagttatcgaagattaacatctaattgataccaggagagcttatattcattcaccagatttatattcccaaaaccagtgctacagattccatagaccctcccacacagggacctgtttattgcccttctcaagttaatatgaattttgaaataaataatacacagattaaataacttttacaaatattgtgttccctttgtatagcttccatcgttaccatactgtttaatttaacttcatattgattacttcaattgttttgaaagaactaaaaacataacctcagcttgcctgatgcctagggcctattagtgagctgtatacaccatcaaagtcacatatatatctctctcttaacaaatttcagtttgaattgtccttgtgtttttctgagacagcttgttatggcacagtctgggtttttcatttcattattttgctttaggagaaaacctgctatagactcatcccactttggattttttaaatttcatgtagaaaacttacaaaaataaaattgaaaacaattatttatcatgccattccaaaaagagaattgatgtatttccaagaaggacataaatggcttacagttatttttaccttaacccatatttttttttcattttaaggataagaataggctttggtccaaggtatgaaagcttattatagaacttggttgcttattttcatggaaaatagatattttcataccagcataaaaattaaagttgtggagaatagtcttatctaaagtgacataaaatggatattgacagtccccccaccactgaaagagaaaaatcttacatctaattttaacaaatatgcagatttttttcttatgaatcaaattaagttccctgaccacctaggggaagtataaatgttctcctctgcactgacgctgtggttttggcctgtaacaggtagattcggtcatatcatctggcagtgcttggaaaggactgctgaacagtattctaaaatagtattttgttagatgttttctaaaattttagtggctcatactcaagagaacttcttataacaggtaaatgtgtcccagtttaaggggattctttatcttcccatgatttttagtggtttaccaagagccatgtttttttgtttattttttcttttttcataaaaaaagaaatgattctacgatatattatttaggttttgctatgaccgtggtgagcacctagtaactttagaatatatttcagccaaaattattttggctatgttctagggtgtggaattttgaagggttctaaaaccacagaaaccaactttctcttgtgtgagctgttgcatggatggatattggggtgcccttagaatcagcctggagattgggcaggaacagagtgagccacagtcactctggaactggtcctctgagggtcctgctgctggccccaccaaatactggccatcactgcttgagccactgccctagttggcactggacactcccctactcccctggactagggctccactgtgcccccaccaccgctgctgtcagatgagttctcctttagccctcttcctgggcatcaccaaccccagatttaaaaatccagagcaaatgtgtctaattggccatgctgtgtctcagagctggtacctgtagaggcaggtgagtggtctgggaatatccagatgtggtcttttcagcctttaatttgagataagccccatctccacaaaagctcatagggtggcagattctccaaatacagggaagtggttcagatcctaggtagactgaaaatgtcagatgactagtcccagcagttgttcctgggctgagatggacccgatgctgcctcataaagaaattctagggttggtccagtggtccactcagagatgcaggtcacaactgaggctttctcctattagcagaaatggacatttaagcctttggtttttgtttggattttgtgttttattttctttgccattcctgataatgaactggtcctggaaaacactgtgttagttgagtagaattctgccttgatagagtgaatgcaaacattccctgctgtgttgatttgaaataggaacaggcattttctatactttagtggcatatggtgctaagattttatcatactttcttataaagagccaggaaactttgcctgcttaaaaatgtgtgtttataaacaatagacttacaatgaatattcccatctgttaggtgaacataatttgtgtaggaattcccataataggtggaggactttgcaactttcttcatattttttccttggtgagacattagactaaagagatggtacaaaacagcatatgcttaatattcaattttgtctctatttctgcttcttgtttgaaagcagttctatttttgggcgttagtacggaggattactatagaaattcataagaatttaagacctatttaggtattgaaaaacaggaaaaagtagaatgagcaatcatataaatatggttatgttgcagtgataaaactgtctttgtaatgtttcaaatacatactgcaattacttgtgctatttcttcccaaaaacttttgttgactttgttttaagctaatctcacagctcccctctgttgtaatcacagcatgtaataatcaaagccgcacatactcctggtctggatttgtaatttaaataaatggcattggctctttgcattcaatttgacattattgtgattgtattcaataattaattttgttttagatgaaccattccacataaaagaataaaaattttaagattaaaactcaacaatattttttctctttataaaagattttattaatccttccctaggagctcaagaagattatcagaggggaaaacatagtttgattaatttttgtttaatcttgaattacctgtgttgtccaaatgttttagtcgcttaaaattatgcctatcagttcctttttcaggttgcctaattgtgcatacttgaataaaaacatgagcaattagttgaatataagtgattcaagatatgcttgggaactgagcaaatacagcgtagcatacactttgtcttttactcgattttgaaaaagtttctctggttatactttgtaaaaggaaatacttttaaattgtggacaagtattactggaacatctttttgggtgggtaaagtgtaccgtcactctgttttcttctcccctttttggaaaatagtcttttcctatttgagctccttttcttttcttttttcttgagacaggatctggctctgtcacccaggctggagtgcagtggcacgattttggctcactgcaacctccacctcccggggtcaggtgatcttcccacctcagcccctaagtggctgggattacaggctcacaccaccacacttggctaatttttgtattttttgtagagagacggttctgccatattgcccaggctggttccttttctttcttacggtagacaccttcccatatgtgaaaagcatccaatcctcatgtcttactcttttgttttttgttcaaatatgatgtaccttattcaactgcaatgtgcatatattcatttttattttttaatacgatcaacatagaaaaagctgtacatatctaatgtatacagcttgatgagttgggagataattatacgcccatgaaactttcaccactatatgtggcataaatctctccatcacctccagaagtttcctcctgccctcttcattattatttttgtgtgataaaaacacataaaacttaccctcttagtaaactttaaaatatgtgatacagtatgattcctgtaaatgctatgctgcacagaagctctgcaggactcactcatctcatatggctgaaacttcctgcccttggattcctccccgcttcccctcccctgtacccactagtggccaccatttcacactctgcttctatgaactggactattttacattcctcttataagtggtatcaggtaggatttgttcttctgtgtctggtttacttcacttagatgaacctgcatgacgtcatgctatgtagcaaatgccaggatttccttctttttaagactgaataatattccatcgtgtgtatacaccaccttttctttcgccattcctcagcagactcctgggttgtttccatctcttggctaattgtggataatgctgcagtagacgtgggagggcagacatctgagattcttctttcagttcttgggaaatatactcagaagtgggatttgggggtcatgtggtcattgtgtgtgtaattttgtaagaaacaatttttccatagtggctacaccaacttacattcccatgtacagtagttcctttttctccacgttgtcagcaacatgtgtttttcatttttcgatagtagccatcctaacaggagtaagatgacatctcattatggtttgggtttgcatttccctgatgattagggacattgagctctttttcatatacctgttgaccatttctgtggctttggagaaatgtctgtctagtatctttgccttattaaaattaagttgtttttttaagcttttttttcctgatgcagagagagagagagagagagagtgcgtgcgcgcgtgtgtgtgtgtgtgtgtgtgtgtgttttgagagagtgtcttgctctgtcacccaggctggagtgcagtggtgcaatcttagttcactgcaacctccgcctcccgagttcaagtgattctcctgtttcagccccccaggtagctgggattacaggcgtgtgccaccacacctgctaatttttgtatttttagtacagactgggtttcaccatgttggctaagctggtgtcaaactcctggcctcaagtgatctgcctgcctcggcctcccaaattgctgggattacaggcaagagccaccacgtctggcctctcctgtattttggatattagctcttagctatatagtttgctcacaccttactcttaatttgtctgtgaacgtggctgagaactcaattactctaccatcttgggcagcttagaagttgtgggctccggagttgtaagacgcatttcgagtggcggttggttacctatctttacttgctggtggattttaaaacatcctaatttacaaaaccagcagtaaacctaaggcaaggcttttatagaaactgtatcttttaattatttttttcctttgaaattgtactaaaaaatttagacaggcatggatttgaaggatgattacttacagttacagaagtggaaaatccaaaggaaatgactttttaacctctgaaaaagtttttaaagttaacatcagggaatacgtggagaagtaaggaaaggaagtgaatacattgtgctgagagatgtccacattggtgactggagagagacgccctgatggcattgctttctctgccttgacgagttctgtatctcatcctgaaagtgttgtttgcctcttcctgtggagtgacacaagacatcgtgttaagactgttgccagttctaggaatctttggaaattctgatgttctacagagagagaattataaacgatttttgattgagagggctagtttaaatgcagtgacttttaattatataacctttctcattcaaccagttgtgagttatatctcctgtgtgcatggcactgtgctagataccatggttacagtgatgaataagacagaagtagatcctagctttgggtgatatttaaagcccagttggggagacaggtatcagtgcgataatctcagaaataaagaaataccatttgacccagccatcccattactgggtatatacccaaaggattataaatcatgctgctataaagacacgtgcacacgtatgtttattgtggcactattcacaatagcaaagacttggaaccaacccaaatgtcccacagtgatagagtggactaagaaaatgtggcacatatacaccatggaatactatgcagccataaaaaatgatgagttcatgtcctttgtagggacatggatgaagctggaaaccatcattctcagcaaactaacacaaggacaaaaaaccaaacaccgcatgttctcactcataggtgggaattgaacagtgagaaaacatggacacaggaagggaaacatcacacaccggggcctgttgtggggtggggggaggggggagggatagcattaggagatatacctaatgctaaatgacgagttaatgggtgcagcacaccagcatggcacatgtatacatatgtaactaacctgcacgttgtgcacatgtaccctaaaacttaaagtataataataataaaatttaaaaaaaaaaagaaataaatggtggttctagttagtgtcatggttagggaaggattgcacagatactaggttaccaaaaataaaatatttgttgagcatatactagatgagatgccagtgctgtttgataaaatagcatctgatggttagatataaccatgaaacactggatataagcattaacacttctttttgctattcaacaggtacattattccatctttgcagaagctcgatgctgggttttaccgctgcgtggtgcgaaacagaatgggagcactcctgcaaagaaaatcagaagttcaagtcgcatgtatgtgtacagtaaggagatgtccaaatgttaaagaacaaagtgtcgctggggagtcaatcagaatcacttttcaccattgtaggaactgagagtttatctttggttctattttgagtagaataattgcaaaactcagtgagagataagtaagcagccagcgtggctggccaggtgaggggctgttgaggcaaagggcacttttcttcatttgaaaagactcaggaccctaagaggccctggggaggacgaaaaagtgaatggggtgccttctgttttaggaatcagctgctcttagcttgtactatgtttggattcaaaatgtttttaaagtataaagttcaacccaattaggtcaaagttcgtcattgtcagttctttccagtgacgatttgtttagaaatcatgctgcaccacaaaaggtacatggatagtgagcgtccccgatggcattcatgtgatagtgatttattaattctttattcagcagatccattttggagaacgaaacttttaaaagtaaacaaaggagatatcaagaatgcaggaagcttaaattttcatgtagtcttgaggagaaacaggagagcgaacttggcctatgaaagtatttagtcctttttctaattcaaaatctatgaagagtaaaaatggactgtctgctttattttatgtacatatgtgtatatataatagagacataacatatataattatatgtcatatatatgttatatatataaataaatatatgtttgagatagggtctatctctgtctctcaggctggagtgcagtggcacaaacatagctcactgcaagcttgaactgggctcaagtgatcctccctcctcagcctcccgagtagctaggaccacaggtgtgtgccaccatgcctggctaatctggctaatttcttttgtttttggtaggggagggatcgcactgcattgcccaggttggtctctaatgcctggcctcaagtgatcctcctgctccatccagccttccaaagtgctgggattacaagagtgagcttggcttgttttactatattttgaatgtattaccaaaatttctctttgtttaaaagtaagcaaaaaaatgttataagatgttaaattacattttaatatatcattataaactttagagaacaaaagagctcctgagttgggctgtactatttggtgatgacagaatttcctcatttgtcattttaaccccaattaagtcttgtagctttcagtgtgagtagatgaaataaaataatatctagttattttaccataagcctaatgactgagtgaagtggagatgctatacatgtttgatgctttttaaaatcactaggaaggcttaaatttttctaaattgtgatgccgaagaatgttgcagaataattgagaacttttattcaattgaatgattgaaaatgtaatcattaaatagagtgaagacgaatacctaaattatattttaagaagagcttcaaaattattaaactctgttttataaaactgaattttgcttaattatgtttttgtttctgttctgtatctctagctcttcaatttttttttttcttttttgagacggagtctggctctgtcacccaggctggagtgcagtggcacaatcttgactcaccgcaacctccgcctcctaggttcaagtgattctcctgcttcagcctcctgagcagctgggattacaggcacccaccaccacacccagctaatttttgtatttttggtagagatcgggcttcaccatgttggccaggctggtgtcaaattcctgacctcgtgatccacccgcctcggcctcccaaagtgctgggatgacaggtgtgagccactgtgctctgcgtttagattttttttttttaatctttcttttctcctttgctttgataacaaatttcattttcttttgaaaaaactatgagtatttttctaatctgttttgttggtttgtttcatcttttccctcaagtattagacactgtcacatagaaaatgtcttttgactgaagaagacattgataatagagcacttctgtggactatttcaaacttatttatgtttaaataaaaatacactattttgccatatctgtttgtatatatatttacatctgaccataatatggaatcttattcaaaattttcaaatgttacaaattttaaaattagccttttatacctacattctaatagctatgttttgtcctatgaccccattttttaaattttttttatcagtagaacaaatactggaacaaaagctagttgccccagattaagtcaacagtatgagagtgggagaatagtatatagactcttcagtggttaggaaatattgctcccaaaagatctgtgcaggagacagtgacctcacaaatgaaggaaacaagctgaagagagcaagggccggtgccgggctggaacgagtttgaaagatttaggagctaggagatgtctggacacattttctgacagtttctgagaaaactgcttcacgtggctctaggatggcttcagcatttcatttcagtgtcacagacagttgcagacatttccttgtattgtcaggtaggacaaagaccatgtggctttgctgaggaatgtgcagcgtgggcgctttggaggcgcgtggcttgcccggtgcttcactcgcaagcagatccgcgttggtcagcgctgccgtgcagtctcgctcgtcctggtgtgaaatgtggcagcatcagtgactttactgtaacacttacctgtttccatctgtgaccccttccctcccccaaaaatgttttctagaacttgaaagcacttctttttctctgcagatatgggaagtttcatggatacggaccagaggaaaacagtttctcaaggacgtgcagcgattctaaacctgctgcccatcaccagctaccccagacctcaagtgacttggtttagagaagggcacaagattattccaagcaacagaatgtaagttgctccaaacgttaaagcttcaaatacaattgtaatgtcacttgctggcaccatctacacagtaagtgtaccaattaaggttaccgatgatttaaaaagagcaaactagtctaggagtcctatcctaatttttaataaacagctatttgaggactggcttgaatatttttaaccagtttaagcaaataactgtctaatattattcttcagaatgttgcatgccctaaaactaaagcagccttacccaactttgcagtccatttttttcttttctgagtgtactttttaagatgtcattgtcatccctgagttgggtttgcctcctagtactaatttaatgagtgctggtatttacttacagtgctgtggggttttttttccccctccttttattgagccatgtttgatactgctttctctgacgataaaacagtaattactgcttatttctctttatccttttatcctaccatgacagttttatttctcttcatctaattagtggttcacccatctattgcagaatagttgctttgtgattagttaggcaagaacatcttgaaataatgcttatctcacattcaagatatttatctaatgcccgacaggttttcttcacttggagctttaagtgattaaaaagaacacttggtatatatttcataactggacattttacaacctaatttaaagacaatattccaaacataaaggtttcaaggctgaacatttccagaagaatcatgaaatgctataagcttaggccagaagtcagatatttatgccatccagtggttgcactcagataaaaattcatcaggagcaaatactattgttgtgctttttcaaaaagaatatgtgtgaggtcatttgccaaatagattttacatctaactgtgaaagtcactgtgggaacccacctgctctctcccctacctgagcatctgtggaatcccttcccgaagccttgtgattctcatctccaaccctacctgagcatctgtggaatcctttcgctaaatctcatgattctcctctccacccctacctgagcatctgtggaatcccttcctgaaggctcatgattcttgtctcccacccctacctgagcatctgtggaatcccttccctaaacctcatgattctcatctacctgaacatctgtggaatcctttccctaaacctcgtgattctcatctcccacccctacctgagcatctgtggaatcctttccctaaacctggtgattctcgtctcccacccccacctgagcatctgtggaatcccttccctaaagctgttgattctcgtctcctacccccacctgagcatctgtggaatccttcccctaaacctggtgattctcctctcccactcccacctgagcaactgtggaattccttccgtaaacctcgtgattcttgtctccacccccacctgagcatctgtggagtcccttccctaaacctggtgattctcctctcccacccccacctgagcatctgtggaatcccttccctaagcctcctgattctcttctcccatccccacctgagcatctgtggaatcccttccctaaacctcatgattctcatctcccacccctacctgagcatctgtggaattccttccctaaacctggtgattctcctctcccacccccacctgagcatctgtggaatcctttccctaagccccatgtctccagtcttctagttctggaccaggatctggctggaacctaaataataataattattattattactattaataattatataatacttataattaataattattattttgagacagagtccctctgtcacccaggctgaggtacagtggcgtgatctcagctcactgcaacctttccctcccaggttcaagcgattctcctgcctcagcctcctgagtagctgggactgcaggtgtgtgtcaccatccccggctaatttttgtgtttttagcagaggtgaggttttaccatgtgtccaggctagtctcgaagtccttacctcaaatgatccacctgcctcggcctcccaaagtgctgggattacaggcatgagccaccacttaagcttatttcacaaatgtttctattttggttattgggaacaaaaatttatatatatatatatatatatatgcatgcagcatattttaaaattctagtaaaaataccagttaccttagaagatgggataattgctatccttttttctttatttaattacaagttacttaggtatccacctttatattgattccaataataaaagatgcctcgagtttcgatgaaacaaaaatgaaggatcaatttttcattcttagtagactgttaggctttaaaaaggcaggtaagggccatttgcggtggcttgttcctgtaatctcggcactttaggatgctgattgcttgagtttaaagcaatctggagtttaaaaacagcctgggcaacatactgaaaccttatctctactgaaaattaaaaaaaaatagctgggtgtggtggcacgaacctgtatttctagctatttgctacttgggaggctgaggtaggaagatagcttgaggccagaagttggaggttgcagtgagctacgatggtgccactgtactccagcctgggtgacagagcaagaccctgtctccaaaaaaaaaaaaaaaaaaacaaaaaacaacaacaacggcggggcagggggtggcaggcaagatacattcttgtataaatattctagaagtttccagtgctgaccacagtatgaccaggcaaacttaggataaatgttgggggagaattggtaccagggatggggggagttagattgaattaggctttcctctcaagcactggagcttttaattaacgtcagtggcagcaaaattcatggtggaagaattctttcaacttagcagcaaataagtctgtattaatctacctgttaacctgtgttctcactatatgcatgagacagcacttattcacgagtatgacagggtatagaatgaaagaacttaatttcataaattttttaaacttgcaaatacatgctaaagcctgtttaattcctggtgagctaataaagtaaagatgctagaagggctttaacttggtgtaatatcaaacaaatggtctgcttacaagcatgaagctgttggtaaatctctaatctcaggaaaataatgcagtataccattttttaaagagatgagatgaggctgattatggatatttacacttttacaaggccctttagtttcgtattttccacctcatcatcaccccaagtctattaagtacctgctgtgcaagattacataaatcagtatggatatgtgtttttctccacaaatttatacatcgtccaaagacatatagctttcacatcccaagtacactgatttgatctttacaaattatatgaatattaaatgatcacatgtaccctgaaactatgtacatctattatgcactaataaaaagtttacctgtttaaaaattaaaaaatctagatgcgaaaacccaatatattgctttccatgtctaagaaagtacagtttttgactgaagatgggagggtatctctgcattcctcgcacccacgggattggtagcacaagtcagatggcatcatatttgttatatacccacagagatgccatttaaaaactagagcatttgactcaaggtgcttcccacatattgaaatgcaggtgaagtttctgcacctattttttttttatttttattttttgagatggagtcttgttctgttgcccaggctggagtgcagtggcccaatctaggctcactgcaacctctgcctcccgaggtcaagcgatgttcctacctcagcctcctgagtagctgagattacaggcgcaccccactatgcccagctgatttttgtctttttagtagagatggggtttcaccatgctggccaggctggtctcgaactcctgaccttgtgatccacccacctcggcctcccagagtgctgggattataggcgtgagccaccacacccagcctttctgcacctatttttaacctccttgtgtgagtttggttccctaatacgtgcacctttgtcatgtggtgaaagcagttcattttctctccccacctccatgtttaaacattacctcattatctgcctttaaaatgtgggctttaggcttataattaaatgattttttttttcattttcaagggaaacagtaagtctaatgttttctaacttgaaaaataagttgaatatcctattaataatcttaacaggagctattatttattgagtacctactttaaacatatcttctctaatcctcacaattgccttctgaggcaggtataattagctctatgtatagttatcagaatggaagattatggatgttaaattacttaccccagggcccccagccaatacacacagagccagggttcacacccgggtctgcctgacactcagtctcatgctcacttctggatcagcctgattctttccactttattggctgataattttttatgtttttgattattttttccatacattgctctagtctttctcatcatttagaagaccagctttcaacttgaaaagacatggattaacctgggtttgcatagaggggttgaaaagtgtcagaggctggtatgttttgaaagtagagacaatctacaattatctcagatactatgtttaattaaaaataggtggaaaaggttaaataccttatgattccactcacacaagataattagagtagtcaaattcatagagacagaaagcagaacattggttgccagggacttgggggaaggagggagtggggagttatgtttaatgggtacagagtttcacaagatggaaagatgtgctgaagatggatgatggtgatgatcgcacaacagtgtgaatgcacttaatgccactaactatacttaaaagtggttaaaataattaatcttaggccacggatggtggctcacacctgtactcccagcgctctgggaggccaaagcaggaggatggcttgagcccagtagcttgaagctgcagtgagctgtgatcacgctatagcagtctagcctggatggtaaagtgagaccctctctctattttttaaattatattttaccacgattttaattgtctttttttttccaaaacaaaaaataacgtcttccaaagacttcccactgtgtacagattaaaatccagattccttcccacattctggggctacagggccagagtctcttgcagtttagcaaatacatcaagctcttttctgttttgaaagttggagacagtcttgctctgtctcccatgctggagtgaagttgaagtggcatgatctcagctcactgcaacctccaactccagggctcaaatgattttcgtgcttcagcctccagagcacctgggattacaggcgtgcgccactatgcctggctatttttttttgtatttttattggagactttgtttcaccatgttgcccaggctggtctcgaactcctgacttcaggcaatccacccgcctctgcctcccaaagtgctgggattacagaccaccgtgcccggccagttttaggtggttttgaccacctaaaatgtttttgtttttctacctacatttggcctcttggtatgcataggagatacacagtgctggaatggctggatgaatgaatgtgaagaaaagtcgtgtaatgtccacagacatcttcagcagaaggggaaaaaaaatgagaacaaacctcaaggaaaaacgctgttgatgaggcagaaaaaatatcttggaaagacgaacagtatattgagagaattgaaaataagttatattcagaatttgaataggtaattacaggttttatctgagaagttgaaaaccccatacatttatttttctgatttactgagtccaaagtttgctatctttgcatatcaaagatgagcttagctttgtcatataaatacagtctaatttgataataaaattgttctgtgttattttggtttagatatattttctttatttccatttatttctcaaaatatgaaatgtgaatatcgatgccatgctgtacttctctttcctccacgacgttatttatgttggtagttatcagattagaacacaaaatcttaactctgtacagtgccattcttgtgcttaattgcaggttcttgtgctcaaattgcatcctgtagcctacctgacaggaatgtgcaagcacaagtattcttgaatgtttttttcctggaaatgcaaagtttatagatgaatgtttcaaaccttcagtcagctttgcaatagacaacttgccagtaatgatctggattgtgaagtatgggcagtaaacagcatcccaggtgactcagaaacagtctgattcataattgtccatgcttaaatacttgaacatccattaacttattaccatttcatttcaatttcttcaagaaagatttgtttaaattagcgcttgcattggaagtcacaacttaatgctcgaatgaagtagatctggttgtaataatgtttttatagttaactaggctttcaaaataatgtgcttttaaaattttatattttataggcattttgtgaatgtttatagagtatatgtgtgaaccgagccatatttggtataagtaaaacagacgagtagatacgggttccaggcctgctttcaccgtaattctgaccttgggaaaattacttattctccctttgcctccattttgccatgtcgatgaaaagggttttctaatcacttctgcaatcctttctggtattaatgttcagtgctgctgttaaggaagggggtgccatggcagttgttcttcccctccctctctttcttccttcatgcatccatggacatttcctgagcacttaattagtgccagccactgttctgcttgccagggacagaaaggggaattgaggcatcccacgtgtgcccctcagtgggtgtgttctgatatgaagcaggtaatacacaggacactttggggtgagggtcgtgctgccacgctgagaagacatggatgggtgggaagagagtcctaagctggagggggttgaattgagtgactaaggacaggtcctctgtggaggtgacattttaaaaaacaccttatagagttataatttgtatataacaaaatgcgcattttcaaagttcatagatggatgaatttcaataaatatgtgcacagaagaaattgccatcccaatcaagagagttcgtgggcccctcctgctgttggtatgcattcctgcagctctgccctcctgcttgtctaatttctattactgcaggctagatgacctgctctagaatttcacacaaatgacatcattgaatatgaaatcctttttctagcttcattcattcaacatcatttctgtggtattctcaatgtgatccttaataataataataattaatgatttttgagtgccaggcactgttttaaggattttatttataacaattcacttaatcttcacggcagcccagcggtttagtactgttattatcgtggctttcctgatgagaactaaggcagagagaggccagcagttggccggcgtgggagccacttgactcctaagtccacaccgttccaccgtgtatatgaggctgttctcccaggttaatgtctgcaagatgggaaggagccagccctgtagagccccagaggatgagtgttctaggcacagaggccagaaacagaaaagagcttgatgtatttgctaaactgaaagagactctgaccctgtatcccctgaatctgggaaggaatcgattttattctgtacacagtgggaagtctttggaagaggttgctattttttgttttgaaaaaaaaaaaaaggcaattaaaattgtggtaaaacatagtttaaaaaaaatagagatagggtctcactttatcatccaggctagactgccatggcatgatcatagcccgctgcagtttcaagctcctgggctcaagccgtcctcctgctttggcctcccagagcgctgggagtacaggtgtgagtcaccatccctggcctaagattaattattttaaccacttttaagtatagttagtggcactaagtccattcacagtgttgtgcaatcatcaccatcatccatcttcagcacatcttttcatcttgtgaaactctgtacccgttaaacataactccccactccctccttcccctagtccctggaaaccactgttctgctttctgtctctatgaatttgactactctaattatcttgtgtgaatggaatcatatggcatttatccttttccacctatttttaattaaacgtagtatctgagataattgtaggttcacatacagtcaaaagaaataatgtagggtgattttatgtaccttgtagctagttttcctgagtgttgagatcttgttaaactgtgttacggtatcacaaccaggatactgactttgatacatcaacaaacagaaggtttctgtcaatactaggatttctcttattaaccttttatggccataactactttcctcttgccctcatccccttcttaagccctaataatcactaatctgcttttcctttctaaagttttgtcatctcaagaatgttgtgtagacagaatcatgcagtatgtgacctgtggggattggttttttttttttttttaacttagtataattccctgattcatccaggttattgtctgaagcctagttggtttcctgttgttgttgtctagtgtttcttggtgtggccataatgtgtagtttataatcattcacctgttgaaagcaatctggattgtatccagtttttggccatgatgaataaagttgctataaacattcttgttccttttttctgtgcatgaacataagacttcattgtgttcatacacacacatgcccaggagtggaatgactgggctgtatggtatttgcatgtttagttttagttttttttttttttttaaatgccaaactgttttccagagtggctgtaccattttgtaatcccaccagcaatgtacgaatgattgcgtttccctgcttcctcactagcatttggtgttgtcatgattttttattttagtcattctcataggtgtataatgatatcttcttgtgtttttaaattttcacttctctaatggctaatgatgttgaacatctcttaatgtgctgattttaaaaagaatgaaattagaaaaaagcaaacttcttgttgtgagaaatgtgttcatttatttgaaaagtcagttgaatgggtgaaagagcagacaatatgcagctaaagtgagacttattgttctgatctgaagaaattactcagaataaaacacagaggaaaaaatatggaaaatctagaaggaaggccaagagatctagaggacagagtaatcaatagacgtccgatggagaaaatgggggatagatactatgcagagaccaatgctatgacgtttcctaagatgatgactcttcacagtccagaagcagaatgagctccaagtaagataaataaagtaaatccaaatctatacatattatggtgtaactgcagaacatcaaagacaaagaagaaaccttaagacaaccatacatgtaattcaggttgcctcagaggaacggcaatcagaagatagctgagagcagtaatagagaacagaggggaatgatgtcttcgaacgccaagggatggaactgctgccatggagttccgtgtcagctaagccaacgatcccaagtcggggagacaggacggtattttcagacaagcctgagaatttatatttccgagaagattgctgaaggatctatgaatgagtttgaggaagaaggatactgaatctagaaggcaatgcagggttagaaatattggcctccgttttatgttctctagttaggaaatatttagtaattggagtgtttaaatatttagatattagatgaggaagtggagacagcaagttgagacaactctttgggcatttttcttgtgagcggctgcagagaaaccgcgcgtgtctctgaggacacgaagtcaagagagctggttttttcttaccatgggggatcccagctattatttatgtattaatggaagttctccagtagagaaggagaatgtgaagagccaggagagagtgaggatgccagggggaacaaagtcctggcaaatgtgacctggacatgcacagacaagcctgggaaggagggcctggagtcatgtggcacggccttcatggtggcatgcggtggcccctcatggcctcacagcttccactctaacaggacggagccagaatatgcgcacggatgcatgtggtttggtaaacgtgcttgtggaaaattgagagatttctcgtggatttttattttctctatgaatatggggatgagtttagaagtttagagtgagggctggtgtgagaagagagagtattaggttatcattcagacagtcagaagcgaactagggaaacatgccagacttatggggacttttgagagcaagggcacagttgcagtttgtggtgatggatatcttcagtaaagtttggaagttctgatgccactgtagagaaggcagctgattgggttcacacaaggttgaagtgtagcctaactaccatgtggaattcagaagcgagggtcatgttgaggctgtctgcaagggagtgatgagtctcgattgtctccgagctttataagagaggaggtgaaggatgttccagtaggatagaatcagaagactgcaggagtctattgactggaagaataattgcagtgggcaaagaagtgggtggactgagcacctcacgtcctctcttcctcactttggctattccattcagtgccaaacagtggacttctcccccacttggaaggaatctggtgacgcagatgagaaaagtcgcaggcttaaacttgtgtggggtgagcttgaatccttagggaatcagcgaatgcttgagtgcaggtggatcagcagacagattactgacgccaccccagctgactgttaggtgacacatagcttcgtgcagcctctctgaagtcatcctgtgggtcacccctccttcctctgtgctttccccttccctcctcactccagggtccacgtgtaagctgttgtaggcgttctgttttcttgaaaaactcggttgtcacttggggtatttgaaatctagacttagaatggcacttttgttgggattgacaaggtttagggagagaccatgaggatgggggccaagattgcatggaggggcagatcagtggtggtgagaagtgtaagactccaaggccacagtgttagagtagatggtaacatggatgtaaagccaccagggagggtggcaggagaagccagtggaggaaggtagggattccagggctacagtcctcaggaaatggagagggaaggaggaattagaacctcagtagggaacagcattgagaataaacgcatcccaatcacatgggcctcagaggaactgggatttggaaggtggaagaggagaaacgggttgggagtgctggctcacagctgtgatgagggtttgctctagctagactagacaaagtgaaggccttctggagctgctcctttgggtatttggctgcaggaccttgcagcttagaatctcacctagtgggtttctgctctgttgcacttcagcttcacttatgaagcagagaggatgatctcttcctcctggagcagttgtgagatttaacagaagagaatgagcaagaaagtggtttgccaagtaatgttcagagatggagagtatatgctatatgccgcccctcaaaaaaggtatgcaggggtgttcaggtaaaaaacgttcatctttctgtggctctctggctggcagtgcacgtagctgtctctgtaacttagagaggacgtgggaggaaggaccctggtgtagagaatatgctggagccatgggcagcccctgtgccccaccgtgcttctgtaaatgtcacactgctcctccaaatgctggtttgtaaaatctagaaagttcttttcgttgttgttctcaccacatccaggaagatggggcacagcgggagtccccttgtctgaactgctcttatcctggggcaaattagtgtccctcaacgtgagtaagaagatggaaagcgccacattgctttcatgaatagtctgcagactgctgatgagctccctgtcaccgcgctttattccagagcctcaccgtgcagagcgagaggtggactccgatgcttgtgaggatttcgtgttttctttcagattgtcaggtagtgcgataaagggttaccttataagcaataataggtcaggatatgggctgttgcccacagtaagtttgacatctacaccatcacatgacgcagttggacttaatgaaggtcactcaagtgtcttctcttttggtgatgcttgttgggcacctgtctgcaggtagatgacactgtccctgctgcttcaggagaaagggcacatcacagatagagaaacgtttctgtgccaagtgaatagcccaagagcatgggggatggggatcgtagaattgcttggttccattcgagttggccatgtagtatctaacttaaatgacaggagtttaatattctatgtaccaatttttcactggaaataaaatacttcatttcacatgagcatatcttgtgacaataatgcatttctttaccaatattagcccattatacatctgaagtcagttgcacataattgcagttcaccaactctacataatactttaattaaaactaggataattaaaatacagttttaatgaacaataaattctgaagttgccaggcctggaatgtgttagttgaatcatagcttgctttttttttttttggctcttaaatctgtacccacattatattttgaaatggcaatgatcacaatcaagaggcattttaaatgcatataatagtatgtactaaaggccaggcaggtgactcacacctgtaatcccagcactttgggaggctgaggcaggcagatcatctgaggttgggagttcaagaccagcctgaccaacatggagaaacactgtctctactaaaaatacaaaattagccagacgtggtggcgggtgcttgtaatcccagctactcgggaggctgaggcaggagaatcacttgaacccaggaggtggaggttgcggtgagccgagatcgcagcattgctctccagcctgggcaacaagagcgcaactgtctaaaaacaaaacaaaacaaatatatatatatatatatatatatatatatatatatatatatatatatatatatatgtatgtatgtatataaaatgtgctagtaaatcatatctttcctatggctgtcttatatatctgtctatccctcttacatacacttgcttatttgctgctaattgtaatcccagaaatgaggaaaaggttttatttttgaaggcccagcaacttaaaacagcacctggtcatactaagtagtgaatatttattgaacaaatagataagtgtttcttggatgaatatataaataatagcacatggtttgttctggggagatggtgtgagactaagtacactagatcgagactcagaaaacaggtttcagtcccggccctgccacgtggtcgctgtgtgaccttgggaagatcagttagctattctcaaggaagttgagataagggtatatatcaaatggaaataatgctggccacctcaccagtgtctgggaaataggattgggtgcgtttatttgataaattgaatatacatgtggaaaccctgtctaaaccgtgaagtacgcatggtgtggtgggattgtgaccccacctctgctcacggtgttctccaattgtctacatgagcacacattagtattcacagccagctgtttctcagctcatttggaactttgtatgttttaggtagtttttgcataatgaattttcagcccttggttggtgataccttgtaagtagatatgccccctccatccttcccttctcctttacttccatcccatttgtaatgtccttgggaaactcaagtgagtcccactgctgttggctcctaagagagacatttttgctgcctgtgtatctgctagatagtttgtttcacagtcaaatataagtgacttttactagcttttttctggactattagtgtcagtgctactctccccaaacacaggtcatttgttcctctgacaaatacctccttgcactgacattttcttctggaagtcactcccgaagtgcaaaattccctcaaaagcaaatgtactttggactctaagggggtactgctggagtcaaaaattaagaaaactttgtaatgctgtttaattcatgacccagacccagggcagggtccttaagagctgcttctggtgacactgcaggatacatctcacctgtacccctgtggaaagccaagggtcagtgggactcaacccatacatgctccttgggaactctctctcatgacaagcctggtcttatctggtcttatctcagggtgttttggtggaaatctttttttttttttttttttgagacggagtctcgctctgtcgcccaggccggactgcggactgcagtggcgcaatctcggctcactgcaagctccgcctcccgggttcacaccattctcctgcctcagcctcccgagtagctgggactacaggcgccggccaccgcgcccggctaattttttgtatttttagtagagacggggtttcaccttgttagccaggatggtctcaatctcctgacctcatgatccacccgcctcggcctcccaaagtgctgggattacaggcgtgagccaccgcgcccggccttggtggaaatcttgactgtcaaagttaccttctcccccacaaaggaggagggggaaagctgccgtctagaaggaaccctagggagaaagggatgtgcttggaggtcaagaagagtcacagggtgtgtgtcccacccagggcattcgtgcaccttagggctggggccatgaggaggctgtaaactggaaagatcaaggcagtcgtacaaagacagggcaaaacatgctaaacagatgagaggcagacagctgcagctgtctggaggtgctgtcacagttggcacccagtgtctacagggtgggttccctctttgtggaaagggaggtagcattcccgggtggggcacagcacaccctgccgagtcctggaaagagggtgaggagcgtcactgtctggaaattcagggtcctacccaaatgtgaagtgtgtggaggcagggtggtgtggaaggcacactggatttaaagcaggaagagggactgtgagagccagctgtgctctctcgtcactttctgcctgtgagcaagcctgacttaatgtttaggggactcgggtttttttccacctgtgaaatggggtcaagccatctgtttggcctctgaggaggtgtggaaggagctggccatcctcaggagggggacattcctggaggcagggccaggcagcgtgcagcctatgcagatgatgtggaggcacgtatgtttttcttatctttctgcgagactactctaaatcttcacgacatgctagtaaagaaagcagaggaagtcttatcacaccaattttgtggatgactgcagggggaaagaaagtggctaaatgatataaggtcaagtcatctgtcagacatagagccgaggatggaggttggcatttgaatgatacctttgtcatcattttcgtgaatgtttatgacaaagtgggtctcagcctgcccatgagggtggtgaaatggccaaagggtcctgcacaggccttgggccccgtgatgcttggtgtctaaaggcaagtgcccgacttcggtggggctccttctcttcatctgtagagtgcaggtgataacaccctggcttgcccgcctcacaggacttttactttggtgcgtgatgatcacatcccctcacaggtgttaagagccctttgtgaatcatgaactgtcatagccgtgaggtggaatcattttctcatgagggcccattctttgctgtaatgagatctgaccaagcctggttctgtctaattcctacagcatttgcttccaagtgacagcccctaatatcgaggtcatccttcatttattctttcctccagtcaatcagtgagcactgtgctaggctctgcggataaaaagatcaatacaatgagtctggcttctgaagggctcacattctgctgagtgggatacagccatcttttagttcatctcatgtagtctttaaggaaaaaaaaaaactttattgagatgtaatttacctaccgtaatgttcacattttcacaaaagcacctaattcagtggtttttagtatattcacacggtagtagagctgtcactactatcttcttttttttttttttttttttgagacagactcacagtctgtcatccaggctggagtgcagtggatcgatctccactcactgctgcaacctccacctcccaggttcaagaaatcctcatgtctcagcctcctgagtagctgcgactacagacacctgccaccacacctgactaatgttttttgtatttttagtagatatgtggtttcgccatgttggccaggctggtctcaaattcttgacctcaggtgatccgcccacttcagcctctcaaagtgctgggattacaggtgtgagccaccatgcctggcccatcaccactatctaacagaatatttccatcaccccagaagaaaaccctgtaccccttggcagtcactcatctttcttcccacttctcaggcctggcaaccacacatctacttctcgtctatatgaatttgcctattctgtcactacctaacatgtgaccttttgacaccttaaatagcctttacccagttgtctttttcgctttctttttcttttgtcctttactgatcatcattaaatatttcaccgggttcttttttggtgcctttcctggactacgttctgtgggggtaaagaagggacattccttctttccttgaatgtatgcttcctgaatgtcagctgccctggtcggtactggtatgatatcacataggttcctgttctcagaatttccagcctggtaaggataaactgaccaaaaaatgggcaaaaaccaaacacataaagaaagtcaggtgatgaaagaaaaccctgtccacagatataatatttataccaaaatttgaagaaagggaaggagccagcgacttgaagaaatggggctggacatctgcgtttagtgtttgcaaaggagctcaggtggcagagagcctggtgtgttccaaggccgaaagggggcctgtgtggtacattctccgaggagagtggcccaaagtgacgtcggcagggactagattgtgctgggttttgtctgtggaaacgagtgaattttctccacgtgtagtggggtggatttataccaggagaaggccatgatctgattggctttaagaaaaccaggctgctttgtgaagaatagagagtaaggggcagaaggagaagcggagagaatacgtaggaagcttctgcaaatgccccggcaagggggactggcagcccagatgaagacagggtggatgacgtggagaaaagtggatgaatgaaagtgtaggttaaaagtagaatccacagggccaaaagagggatttgggatgtagtggagttaagcttcttgcttctgattagagcccttgggggaatcttttacagaaatgatgacaactggattcagatcggatatggggcttgttcagtttgagatgcccgtgaagtatctggtgacaacaattaaccagatgtttgtaaacacacgagtctttagcttaaaggaaagatcagaccggagacagaatattggggacaatttgtatgtaggtgatatttaagaccttggaaatggtgagttcttgcctgcagagagatttcagacacagcaaagaagagaagcaactgctgaggagctctaccatgcagagcagggtagagaaataagacacccatgaaaatatggaaagggacagccagaaagggatggggtagccaggagggcccaataccatggaccaccaagaagagagcttttcacctgattctacataagcagcttgagaaaagcttgagtcaacaggacttgaattccagcactaaataagtaaacaagcaaacacataaataaagtaagagatcaacaaagcatagaaagagaatggggaaataggagggagacagaagtggagagagagagaaagagagagagagatgggagagcctatctttccatatcttttgtcaccttttgagtaaaacctgcccataatgggctcagctccgcagccaggttgaaaaaaggtcctgtttcacgccccaacataaccataaattagaaagccttctggaaaaaaatgtgttgtggacagatgagaaagtttaggatcaaacaaccatagcagcactagctcatgcttcacccaggatgatttctcttcatgttttagtgcttggtctttgtcatcgctgacggaactgcactgttttaccttggaaggttataaatggggaggcatccttagaacttatttatctttgagagcatgaatcttttcttcttcaatctagacttgcccattcattattagatgaggtaaattattatatctgagagatacattatgtcctttggtgatatgtgtatactttaatagtcagggtctgtagtttaatgagtgaagcaattttgagaattacctctgctgagtaatttttggtatttagaaattacttatgtgaagcctgtccgtgttcatggtcatttcaacacctatctctcactctctaaaatcattgagaatccgttattgcctactccagtgatctagataaccatttacctgagctttgttgagttcagtattctagctaaaatcctgtatcacaccaagtactttgaacaactaattgactatacataactttattaacttttttcatatatttttaagtaatggttatatgcagagaaaccatggtttggtttgaatctgctatgtatggattaacattgctggattaaattttagttaaatgtaagaattttgtctatggaaatgcatgcaaaacagtacttgtgctaattaaagttggagagaaaggggacattaacaacctgccgttggcttatctctgatcctctgttgtgagtggaatgtctagttgtgtagtaccccgccttcatctatcacacgctatatgaatttaaataagttgtaaatgccctggatttgatttagtcctttctttgatctagtgatgaaataaggaattgtggctatcattgaatttttgaaaagcatctactgattaaaaattttaaaaactgtttctaaattcttagtgtgaaatgccctcggtttagcattttccattattttgctgtttttaacatcttcaggaatatatatgatttggaaaaatgcagtataaaatggtggctaagaatgtaaactcggaaaccaggctgtctgggttcagaccctggctgtgatacctaatagttgtgtggcctcgggcaagcacctgggcttccgggcaccacactttcctgttgtgtaaagctggtgtagtaataacacctgcctcatagcatggctgagggggttacctgtttaagcacgtgcaactctagagggcttagactactacctgggtgtagtaagaccgttattaccattagtggttctgacaactctcattattattaccacttactcaaatgtttcaaatagaggaagaggcaacggttgtatttttttttttttttttttttttggtgttcccttcaaggaaatcttgcagagaaaattgcattctgtatatctggttactttcatcccatctggaggcacaacaattattttcttaatcctttattcgaacaaaagtccaaattctcaataacaataggtaaaatggaactgatggatcagtgttgaaatgggtcctacgggaaaagttgtaactaagttatgcaggtttgaaaggtatcatcatctgaacatctcacaatactcttcaaaaagacatcctgtctggttacacaaaagatggagcatgagcatttttcacagctcagcactgggagccagggacacatctttgcctagtcccctgtccttgcctgatacattagtcctgaaagtgggaaacccatgactgtagacaactctcctagattctgtttgtcctttgaaaagccccatttagcaaggcagagaaggcagtgaggacccaggctgtcttcctggaggtccagagagaagaagggtgctgacaagggccgctgcggggacgattgggagctcacaggcttgggttcggagaaatggttcctctcttaagagcacaacagcaacaacagatgtttcgggttctttgtcttctaaatgtgtctcacagatgtacagtgtttatatacgtatatacaaattatatacaggttgagcatcccacatctgaaaatctgaaatttcaaatgcttcaaaatctaaagctttttgaacatcaacatgatgctcaaaggaagtgctcattgaagcattttggattcggatttcagactttgggatctgagatgcttaacccagtatgcattatgcagatacttgaaatctgaaaaaatctgaaatacgaagcacttatggttccaagcattttggataaggtatgctcaacctgtaatatgtattatgtatatgcaagtatgcatgcatgcatagatgtgtatgcatatatgtgtgtatgtatcaatcagatagtacacatatttgatctcattttggactttgaaggagtgcataattagattattttgtttccatatttgaaaacaaaatctgttttcaatggtaagcagaaaaattgttgaaacatctgttacagtggcaaaaggctctgactcttgtttaaaatgagtaaaattgtgatacttacttttagagtaagatatataatgataatagtacagtgtcctacatcagagaaatgaacatccatgtttttgttttcaagtgggataattgtaggtggagtgtgtaaaaactgaagcttatttcatgcacacatagtatctgttcccttctggtgtttttaactaaatgaaatatatagggaagtgggattcatgcttgcgatgtatcttctcgacttggggcttgttctcagggccttgcttgtttgcattctgtgatgttgtccgcttagaggtttgttcttcagctgagggacctgaacaacacaatgatgggtaagatgagagagattgctgtttagaccatgtggccagagagggggacagtgtgtgtgacatgcagggtaatcacctcattctggtttgtccaggactgtcccagttttagcactgagagtcccctcagtccctgggcaaaccgagatggctggccaccctacttgtttatagctactgtgggtataaaacttgccacactagaattatgtgttgtccctaccactgtcaaagtctgtacatctaaaaggaagtatggaaagtagaaaactaaatctaagattagctaactatcctgtaaaggctaagcaaggcagaaaggtttcatgaacagaactgaatttcttttcaaagcatttttcttaggaatgtatcattgtcactgtaggaagaagttgatacacttccatggtatgctaggcttataaatttgagaaaaattaaccacaagatatttccgggcccctaacatctcattttgggtacattgtaccttcactctagtttattttccctttgttctttttctggacaacattcaatgcttgttgaaacacacctgttggaattagcccagtgagcatttctcagtttgccactgggagatatttttctttcttcttggtggaatgcttgacaaaaacatacataccttgaagggagtgtaaagcatgaggcaagtcagaggtgtgcggaggagctccgtcactgggagggtcttgaccatggcaaatgttgcaatgaaaaacaccaggctgttaattaccccacaactcagggcaactccagctaaaatgccattgctttgtggcaaagtataacaagaaactcgaatctgtgtactctggtccctgtatgtatattttcttctggaatattacagcctttttcattgtgcttataaatttgagaactagcatccgggcacagtggctcacacctgtaaacccagcactttgggaggccgaggtgggtggatcacttgaggttaggagatcgagatcagcctggccaacatggtgaaaccatgtcttctactaaaaatacaaaaattggccgggcatggtggcgggcatctgtaatcccagctgcttggaaggctgaggcacaagaatcgcttgaacccaggaggcagaggttgcagtgagccgagattgtgccactgcactccagcctgggcaacagagcgagactctgtctcaaaaaaaaaaaaaaaaaattgagaactagcaatagtctgatagagcttttggtctgctttcaaatctgcatgtgttctaataacttggcatctttcttacggctctgagatgaagaaacattgcctccaagaaacagaaactgttactttcatatcttatttgaaaaatggcaatgattttggaggacagtctgtcattttccagaggaacagatgtgacccatatccacagcaggatgattcagaccattataaactttgagtaggctcttctgaataactcagagatccttgagtttacctgaaagtagagaaatgaattaatgatgtaagtctgtaagaaagagtggactctctggctgttgtttttctgaagcctatgaaacctcgtagatgggcccttcctatgtgaagtaggtcccaggtgtgaatgccctctgtgcctcctcaacaggagacccacacatggggaccaccctgtgcacgcagagcagtccactatcatccccacctacagtgatgccttgagccccctctttcactatattttcccgtggcctcacctacaggaacagtttgagcagattctgcaggttgttaacattagagaaaacttgcatgaatctacatatcagttaaaataatgaatagttcttttagtcctgctctagcctctgctgccttatatcacattttgcaattctttgagggtagggattgatttttgttcacctttgcatctcttgtatacaacacaccatagcacaccacacatattgatgttcaagaagtatttgtttggttgaatgaatggagctttgtcttgtgcctgactagttaataaatatttttatgtttgtttccttgtccttctcttttttgcatggggagggagtgccacagcaagaggcaactagaagtagtatttcgtggtgactgcaggacatgtcgtgccattcattgagcattggtgctttctctcacgtggatcctgctgccatctgcagtctttgtttatgctccccttgccctccaaagtctggagacaaaagtgataaagttgattcatgcttggagtatccagcgttccttgtgttgcttttctctctttattaacagatgtagattgacttagtgatgaagatgtttcctcagttggttccatttatgaagggcagggaaactcagaacaccttctaccatcttcccacaatttctcggttggctcacacttcctattccaattagtcagggggttcactctttcttcctgccaccacctttgttctggccattggcataattctgcttagattcctgcaggaaatctcagctgatctccaagtatccagctttgtcctttattcacctcctaatccagttaaccagatgtttctgaaggtggcatatgacacccccaccccactcacctttaaaatccttttagtagtttccgggcctcaagatgaagttcgagcactggtcctcctggccttgtgccgcctgcatctggccttgtctgtcgggcttgtttctccttttcccttcacaaggcagccacgctcagccttgtacactgtcccagctgccccaggtctcttgtcatgggactttgcacatgccgtccccctgcctggaatgccatcaccatgctggattttacttttagcttcagattttatcttacatttcagatctcatcactttctctgagaccatttcccaggctcctgccctcaccctgctgccgacacacagcaggttcagtgtggtttccctggggtctggcgacacctctccctgttgcaggtcttgtctgccgtgtgctgccatggcttgggccttgcttctctgtatatcataagctcctgaggacagacactctgtatctcaggccctaaaatagtgccttgtgcgtcgttggcgattggtatttgtttgaataaattaattgttttatgcctaatattaattttcttttcataattacctgtcaaagtacatttgtgaaaacaaaaaaaatcaaaggagagacatcctttaatgatgtcagtggtgagatcaggtggtccatgccttcctatctcaggtcttgcagggtggaaacgagggataaatgcctgacgtttccccttgtctgcatctgctatccgtcacaagaggtgttggctggtgcagtcacatcacacttttctaaactcagaattgaagtgagttttttatttactttttttttaaggacttgtgtttggtgttttggggtgttcttacggtttgggaaattttatgctaaggacttgttctttccattaagtgctcctagaagaaaaataaatgacaaaagaaataaaaatcccaatgaattgtgacatattgtaatatgtcttgtgcatatctgtgtaccttggcagattattctgacctaactgtagctaattttcatttgagaaatacatgtccatgaagtttatatagtgtgttcaaatgtaattttattataaccatattattataaaaaacacacatttgtatagagaacactgcagcatctacttattccattattacaatggtaacaccatttattttttatgagtcacttgtagaatgacattttggcaataagtcaatgagtttatcatggaaaagtcttcctcccaacctcctcctaccctgaggcttttctattcagagggaatatctttttcaccctcatgcttaagattcaaggatagaattcactctttttgatatatagcttgatgaattttgacaaacatacagtgttgatccactaccacaatcataaaatataaaatagttctatcaccgcccaaattctcccacactccattgtgatcaactcttcctccaccaggagaccctggcagtcacagatctgttttctgtccctatagttttgcattttctaaaatatcttatgaatgggatcctaaagtatttagcctttgaatctggcttgtttcagttctcgtaatgcatctggtactcatctctttgttgcacatatcagtactttgttcttctttattcataagtagtattttattgtgtgcatgtaccacagcttgttattctattccccagttgaagggcatttgggattgttccagttttggccatttgcaaataaagatgctagaaacattcacaaatatgtttgcacatgaacataagcctttattttgcccagttacatgcttggagtagactttctggtaagtgtatgtttatttaactttataagaaacttataagaaacctcaaagtcctcagggaaataatcagaaacttagcttgctatacctaacaaaactatcatttgaggtaggggacagagggataatggcagttttagacatgcaagccattctcattatgttttactgcttaataagctgccctgaaacccatcttagaacaaaataatcaggtgttttgtacacaaatctgcaatttgagcaggagtgggaaggcttatctttgctccacctggtgtcagctagggtggttccactgatggcagtagattcctcttccaacacgactcactttcatggcaaaagttggtattgactgttaactgagagttcatcagagttaatgaccagagaccccagttcctttctacatggacctctccatgggcatggacttccttcaaagattatatgctgggttccaaggacaaacatacagagagaagctgtcacataaaaactatattgccttgggcctggtgcagtggctcacgcttgtgatctcagcactttgggaggccgaggcaggcagatcacatggtcaagagttcgagaccagcctgggcaagagaccagcctggccaatatggtgaaaccccatctctactaaaaatacaaaaattagccgagtgtggtggtgtgcacctgtaatcccacctactcgggaggctgaggcaggagaatcacttgaacctgggaggcggagtttgcagtgagccaagatggcgccattgcactccagcctgagtgatagagtgaaattcctactcaaacaaaacaaaacaaaatactatattgccttttatgatgagccttgggagtcacaaagtgtccattttcaccattgtgtcactagctgaaagagtcacaaaggcctgcccaggttcaggagaaggagccatagacctgtccctgtgtgacgtcatgggaggctctggcagagcatgtctggtaaggaatgttgctgtgccccatttgaaaaggacaattggccacataagggctcaagaagtttaccacttaccaaagctctttgagagaatctaaaaaggacacattccagggagaaaagtaaatctgagaagaagtagaatattaggagtgataatgaacaaataaggtggtaaaacatattggttagtgtaaatgaatgttgaatattttgaaaagcaaagaaatgtggaattgaaatcccaaattataagagcatggaaagcagtgtaggagcagaggggattaaaaacctgttaaagttactgctttgtctcataaacagatacagaaacagattaactacagaccttgttgcagaatttttatatttggaacatgttcaggttttacagcaccttcttacccccttttcattgaactcttgaagatctacttctgctcccaccaaaacagaatcatctttgagttcttactctccttgaacttcgctggtattgactgttcggtttacttccaccttctttaaccactctcttcttttgaattcaataacacaacacactcctgctcattttttctggctctcttcttcttagacctctttgccaacttgccttcctccacctgtctttaaaccttggatttcctcaatccttggtcctagcacttcactacctcccaccttattctccctccttaggtaagttcatccaagctcatcagctcacataccaactatagcacttgcagatgactcacaattttacatctccagcccacatcactcctttgagtttcaaacctatgtattcaacagcctattcattgtattttcctggagttttttcaaaggtgcttcatactcagtaggttgaaaacagaactcttttttcttcattgaccctattttccctgccttactcctggctctcctttcttaacataaatgacactgccatccaacagttgcccaagcaagaaccaaggaattatccttgatacttctttttctcttccaccacatccagtcaatcaccagtttctcttattgtaccacatgttatcccacaaatctactcacatcattgtgtgtccacctctgccaccattcctgaccaaactcttgcctctttcattggtctctaccttgtttccctatgtttattttgtcttctctctccattccccatgctgtggtcagaatgatatattaatatgaacctgatcttgttactctgttccttcaaatccattagtatattagtctgagtaaccaaatccttaatataaacagcagggtttgtgtaattcagttccttcccttatctacctaaattttttcttccatctctttccctctgacgtccagccacagccactttggtatattggttacgttcttagtttcccggatcagatacctgagtttgaatcttaacttttcacttactaggtatgatcttagacaagttcttaaacaaaacaaaacttttattaatggacaagttcttgaacctatgcatcagtgttctcatctctgaaatgcagttattagtctcagcttcttaggggatttgtgtgaattaaatgagatgaaacgtgtgcggtggtagcacagtgactgacagttaataagcccccagtaaatgttagattatttgcttaacgaaccacctcccttcttgtctctgggaattctcgttgctctccccacttatacaggatacccacccgcttgcttcccttgcttagtactgacttatccttctgcagcaaaggaccttacatcccagctggctcaggacagacccagtttatgtctgttgtagatcagttaacatttactgtttttaggtatccccttttactactggtttgtgaaataaattagatgatcacccttttgtgctcagttcaagagtaaccttttttaggaaaccttctttgattcctacaaggacaggtcgtctattatttgttcttacagcacatcctgtaacttttttttgccatagttaccacgattacagttaaaacagttcattgcataactagttccttgaggtttgtttctcctattgggctctaggcccttggaggactgggacctcaaggcggggggtgtcttgccttacccctgagttttcagcattggtcttatccaagtcattactcagtatatttagaggagacaagaaacactgaacaggatctggtttggacttcgtgtctgtttctgactttaaatgtcaagtcacttcctctcactgtctcttcatttcttcatcttgtaaattcagaaaattaagcttaatgttctctagaattccatcggcctctacattgtgtgagtctagcccatcagggacattttttaaaccaatttttaaatatttatagtcacaaatttaagaaggaaatggaatcaatgtacatctccccaaagacagagtaaaatactttgttgctcattgaatgaagctctggtcattaccctttttgttattatgattcctaatttgtaagctctgatgttatcccttctttctcaatatagctgagacaaatgtgtagtctgtatgatcatatcattgctgttatacctatttacaagtttaagactgagtcaatagaaaaaaatccaagtgaagagtgtttaaaataaacttgtgtttctccaggaagttaactaatcaaacacttttcattgtagatgttgtcattcagtacaaaataatccctgagacagtctcatgaaaaacctaatgcattttttggtgagttttataatgagattaaaaagaaattaagagcaggaagtgaaattataacgccagtgggaaatctttgaaaccattttatagttttttccttcttatgtaatatgtctgtgagattgggcaggtttttgtttgcttgcttgcttattgtttgtgtttataatgtggaggaatcagctgaacttgacttatccctttacaactgatccatgcctacacagtagttgcttggagctaaaagcaggaacacatggaccctgaggcatagctgctctgaagtcctggcggcctctgggagggcttatccatgatatgggacacagggtctcctgaggtcttggaggagttttcctggtaactctgaggagtggcgggtcatggtgtggtgaccattggtctaacctgaaggactataggaatgagggcagggagaattgtagggaggcagccgatgctgctggtgagaatgaaaacatcctcagagtggcttccatacccatcctgtttctgtagtgcccagttattgtgaatacccatcacacgttattctatcacagcaagcagctcatctaccctactgcacccccaagttcttgaagtgtctctctgtttcttgccgttactggaggtaagccaacatgaaagatgaaagctgtgtttatacttctactgcaaactcttgaggaaaaaaacagaggcattagccaaaagagataggacatacaggcaaagaagaaagatgagctggaaaccagtacctaaataagtccaaaagcaatctatttatagatcccagagtgagatcgataaaggagatgatgtggagaaatatatatatataatatatatatttatataatataatatataataatatatattaaatatatattaaataaatattaaatttatatataaatttgttattaaataaaatttatattaaataaaaattaaatttatattaaataaaaatgtaatatatatttttataatatataattttatatatatatatatatatatatatatatatatataaaaaatacagaaagctctaagtatgcacagatcacacttttgccaaaataggcacctacaatgagggccccatccccacccttgagggtttggagtgatctttgggtaaaagctctattctaactcttgaaatggttaaactttttctagatgcatcttttaatattacttcctcttttattccttttttctattttttttaaataagcatctttgctttacttcttttagctatgaagcagctcttgctgatagtaaataaatacttaaagtatgaagatacttccttgtagcatttgaccaatttgtaaggcagcggttcctcaatttcagtgatgcaccaagcttttccgaaaatgagttccaaagggaattgatttttatctgcaatactctcatcctacagacaggatattgactacacttgatagaatggaagtgtaaatccagaatgaagcattgcaggaacaaatcccatgggggcggttcatgatcaacagaatcattcattggacggaaagatcggagagctagacagtgtcaatagagacaaaaggggaaataaaagcattcatttcctgaaagagtcttttcctggaaggtttttgttgactggctcttccttttagtatactctctattcctagttgtttatcagcttatgtgagaaccttaaaactcataatcatttataatcaatgtttaaacatggaaaaataaaagtacataccataggccccgccggcctgttattacatgagtttattaacattcactgtgagatgccttggtatagacttacccctttttatttctgtctcatgttgttttggatattctgctttgctaatgcattaggtagtttcgtcttgctctgcaaagacaaaagctcagtcattgacctggagggcccaaaactgcgccccctgctgccttgtgtatttggtggctggcatagtcagttcattatgtggcaggcaaaagtttgcattccaagggcggaagacatacacattggttttgtttgagaattatatcataaaactgagttctaagtacttcttgaacattgagattattattgatgaactgattataaagtattcttaaatataaacccaaagcaaattttattaaaaataaatagaaatttgattaagaataagagataatttctaataactttttggtaggtgacagcagggagatttgtttgatcatggagtttttaaatgcttttaagtcttgaagtccattaaggcatagaagagagaataggagaaaaaaacatctctgaatggcacagaccgatcacatgttgattgaagcacagtcaatgtgtatactgaaattgtgagtcaagagctatatcactaaaagataagggaaagacagcatcagaaattgactacaacaacgaaggtgtagtgggagataaagttagacgacatgagattcagtgttacagatggaggcaatttgagaagaggcgggtggagtgtagtgagcatggtaatgagaaggaaggagggcatctaccccacgtccaagtccaaagcagggtgggagagacctagagagggctgctagggcatgagtgtcagcaggggaggaccagccttcctgttgagcaagaagaagaaacatttagaggagagggtgacaatacaggggcctttgctgaggctggtctttgagtcacagaaagcacaatggaagtggttaaggagttttggtttggtgagggatgtagtgtggagtaagagctgttcatggctgtttggggattcatatacaggagatgagggatgaattgagattctaagactttattccataaatacggacaaagggcagtgatgtgttgttcagtgtttgataactataactggctcttggcagggaagagccctgatgtgtagctttttccaattttcatggtgtgaatactcccaccacagtgtattccaggtgaccaacatgacgtctttctataaggagttggacagagatccacaagattggctctgtgttcagcacgcattgggtaaagggcatggctggattaatgctggtagactcaagccaatcattaggcaaggctgtgagtggtagggagtagagggcatttggtatccttcctgacccctgtggatagaagcatagtgacctgaggaacaatagtcttcttggtgtgtgggccatataaaaacaagcctgcatcaaattctgtacatgggttagagtttgctagccacggctgtaaaccttctcatgcccgtgagccatctccacgtgtgaatctaacagatatctccaatgttgatctccctccatgccccaaacctgctccacccatagtctatatcatatcatttcatggcagctttatctttcaaatggttcaggccaaaaccttgatctttcacccatagccacagaaaaacctgttagctttcctttcaaaagctattcaaaatccaacatttagctgttttcactgctaccactttggaccaagtgatggtcgtctacagctggaattattataacagcttctggtctgtggtctagtcttcttgcttgcttgtattcaacacttagctaatctttttttagaatgtaagttagatcatgtcagtcttcaaaatcagaaatttccagtttcctgtttcattcacattaaatgctggagtacttaaagtggcctacaaaagtctacataatatgctccccattacctttcttcctccccctactcctttttgtttgtttgtttgtttgtttgtttgtaaagagatgaggtcttgttctgtcacccaggctggagtatagtagcatggtcatagctcactgcggcctggaactcccggtctcaagccatccacttacctcagccactacaggcatttttgtagaaactgagtctcactgtattgcccaggctggttatgaattcctggcctcaagtgatcctcccaccttggcctcccaaagttctggaattacaggtatgccatgccccgtatgtcttcttttgagaagtatctgttcatgccctttgcctactttttaattgggttgttttttgcttgctgatttatctaacttccttttatacgttccttatatgttctgaatattagacatttgttgaatgcatagttcctgaatattttctcccattctgtaggttgtctgtttgctctattgagtttctttttttgtggcactatcacggctgactgcagccacaaactcccaggctcaagcgattcttccacctcagcctcccaagtagctgggactacaggtgcatgccatcacacctggctaaattttgtatttttttgtggagacggggtctcactatgttgccacctggctaaattttgtatttttttgtggagacggggtctcactatgttgcccagactggtctcaaactcctgggctcaagttatactcctgccttgtcctccgaaagtgctggaattacacgtaccacacctggcctcttctagtactttttttttttttttttttttgagacggagtcttgctctgtcgcccaggctggagtgcagtggcgcagtctcagctcagtgcaagctccacctcccaggttcacaccattctcctgcctcagcttcccaagtagctgggactacaggcgcctgccaccacgcccagctaattttttatattgttagtagagacggggtttcaccctgttagccgggatggtctcaatctcctgaccttgtgatctgcccaccttggcctcccaaagtgctgggattacaggcgtgagccaccacgccttgccctcttctaatattttttaagcttgaggtcttatatttaagtctttaaaccatcttgagtaaatttttgtatatgatgatagaaaggagttcaattttattcttctgcatatggatatcccattatcctagcaacatttattgaatagggaatctttactccattgcttatttttgttgactttgttgatcagatggttgtaggtgtgtggctttatttctgggttctgctccattggtctgtgtgtctacttttgtattcataccatgctattttagtttcttaggccttgtagtatagtttgaagttgggtaatgtgatgcttcaactttgttctttttgcttctctaacctcatcttttacctacttctgttccctggacataccaaggattcctgcacctcttggcctctgggatgtttgtttcttatgacttcttcaagaaatctgggtggctaattttgtacttttttcaaatatccttttcttagtgaagacttttctggccaccctacttaaacccttggaatttccaactctcccacagggattctgctctgtgtgcgaaggggtatgtgtgtatgtgtgtgtgtgtgcatgtaggtgtgtacactatttttatttaacatacgataagcatctttggccctggattcttcttttttagatgttaatattgttgtattagtctgttctaacactgctagtaaagacatacccaagactgggtaatttataaaggaaagagttttaatggactcacagttccacatggctggggaggcctcacaatcatggctgaaggtgaatgaggagcaaagtcaggtcttacatgctggcagacaagagagcttgtgcaagggaattcccatttataaaagcatcagatctcgtgagacttattcactaccacaagaatggtatgggggaaaccacccccgtgattcaattatctccacctggccctgcccttgacacatggggattattaaaattcaaggtgagatttgggtagggacacagccaaaccatatcaattgttaaatgtaaagacagtgtttatgaattgaaagattcaatatgtgaatatatattttatatcttaatgtgatcttaagacttactatgttgctgtggtaaacaagacagtgtggtattagtggagggatagacacatagttcagtggatggagtagagaacccagaaatatattcacacatggataaccagctgattttttgacaagggtacaaaactccatagaatctgatcagaggctgatgtccagaatgtgtaaagaacccctacaactcaacaacaacagaacaaacaaagtatttccccagagaagatatacaaaaggtcagtaggctcatgaagagatgttcagtgtcattagtcattagtggtcaaaccacagcaggtcatgacattaacaggtcaaaaccacaattagacacaacttcacaccccttgtaacagctaatataaaaagtagaaaattaacaagtgttggtgaggatgtggaaacagtggggtccttgtgcattgctggtggaaatgtaaaatggtttagccaccgtggaagaccgttggttgctcagaaagttaaaaatacaattaacagcaatttcacatctaggtatataccccaaataattgaaagcagagacctaaacagaccttgtacaccaatgtttatagcagcattattcacaacagcaaaaatgtagaaataatctaagtgtccatcagcagatgaatggattaacaaaatatggtctgtaggtaccatggactattatgtgcccataaaaggcaggagctttgaaaaatgctgcatcacgtggacgaactttgaaaactaatcattcactatgctaagtgaaacaagccagacataaaagaacacccattgtgtggtttcacttacatgaggtctctagaatacgcaaattcataaagtcggaaagtagaatagaagtcatcatggccctggggggagggagagatgggagttactgtgtcacaggtacagagtttctgtttgggatgaagaaaaagttctggatagaaatagtggtgatatgcacaacactgtgaatgtacttaacactatgaaattgtagactttaaaatcattaaaatgatagatttcaggcatattttaccacagttttttaaaaagcaattcaggggaggaaaggtgatcttttcaacaaatggtgctggagcaattgggtatcaacaggcaaaataatgaacctgacctaaacctcacattttatatctttaaaaaaacttaaatgaacaacaacaacaaaatgacaaaacatacgagagatttaaatgtaaaatgtaaggttataaaactttttggaaaacacaggaggaaatcttcagagcctacggattagtgaacaatttttagctatggcaccaaaaacatgatcaatacatgaaaacaaaataaattgaatttgatcaaaagtgaaaacttgctctgggacagatgctgcaaagaggaatgaaaaaacaggctgcaaactaggggaaaatatttgccagccacatgtctttcaaaggacttttatctgaaatctgtgaagaactcctaaaattcaatagtaaaaattcctattagaaaatgggcaaaggaggccaggtgcggtggctcatgcctgtaatcccagcactttgggaggccgaggcgggtggatcacgaggtcgggagatcgagaccatcctggctaacatggtgaaaccccgtctctactaaaaatacaaaaaaattagccgggcgcggtggcgggcgcctgtagtcccaggtactcgggaggctgaggcaggagaatggcgtgaacccgggaggtggagcttgcagtgagccgagatcgtgccactgcactccagcctgggcgacagagcgagactccatctcaaaaaagaaaagaaaatgggcaaaggagattaatagacatttcatggaagaggatatacagatgtcaaacaggtatatgaaaatacctttgccatcattggccattaggaaagcgcactttcaaaccacaatgagatttcacttcctacctatcagaatagctaaaataaagagacagtaacaacatcaaatacgtcgagatgtaaagaaatgggatcagtcctgtattgctagctgctgtgtaaactggcatatagccactctgagaaacagtgtggcagtttgtctaaaaacaaaacatacgcttaccatatgaccctatcggtcacacttcttagcatttatccacagaaatgaagacctgtattgacacaaaaatgcacacgcaaatgttcacagaggctttatttgtaatagtcaaattttagagatttatttgagattagtaaaaaaatcagaaaccactcagatgttcctcagtgggtgaaagagtaaacaagccgtggtgcatccgcagcatggaatcctttgcggcaataaaaggaatgaatgaatgaatgaaccaggcaacgacttggctggatctcaggggcatcatgcttagggaaaaacccaatctccaatctcaaaaggctttagactgtgtgagtccatttatattgcattctcaaaatgactcaattacggagatggagaaaatattaatggtcgcagggagttagagacgtaggagagcttgagaggggaggtgaggggagacggctggatgtgaatttaggtggacagcacaggggatctttgtcgtggtaggacagtctgtgtgttgattgtagtgatggttgtataaatgcgcacgtgataaaactgcataaaactatatgattgtgcacacacaaatgagtacatggaaaaatgatgaaatctaagtgaggtctgggtgttgttccaatgactatgcaggttttgatattgtaccatagttacataaggttttactttgggggaaattagatgaagagtacataagacctttctgtacaattttggtatcttcttatgaattattatttaaaatctagtgattttaaaatacaggtttgcatcttttaattattgtcaagtaactatttgcatatgaatgtcaagaaatggaacctgtggcatctgagaatccctaggtttgttgtctccagatgcaactcctcttcctcttaaaggcaacagctatcctgacttatgcgttagccactttgtatttcttattatttatttatttatttatttatgtattttttgagatggagtctcgctctgttgccaggctggagttcagtgatgctatcttggctcactgcaacctccacctcccgggttcaagcgattctcctgcctcagcctccggagtagctgggactacaggtgcaccccatcaggtccagctaattttgtgtattttttagtagagatggggtttcgccatgttggccaggatgatctcgatctcctgaccttgtgatccactgcctcagcctcccagagtgctgggattacaggcgtgagccaccgcgcccggctgccactttgtatttctttatagtttcaccatctgagtatgcccccgagtgctatagtttagttttttgactttatgtaaatgaaatctgactgtgtgaatccttgtgtttctaacttctttgaacatagtttttgtagcattcgtatttgttctggaaagcattcgttttcattgctgtttaagattccattgtgtgtacaccccagtgagttcattcattttaatgttagacttttcctgatgagatgattataaactgctgctctgacctttcctgtacacatccctggtgtacttgtggacatctttctgttgagttttacctcagaatggaattactgggtcataaaggtaggcaagtcttcaaatttatttttcaaaatgccaatttttcaaaatgattttcttaactgtccatttctttcaataacacttaatgtcttttgacatatcatacttacttacagtgtatattatgtgtctcccatcactaaaatataagctccaaagatcatgtgctttttttttatatttttatcccaagtatctagaacagaacatgggacatagtaggcacataataattacttgttgaatgaatacattgaatctatgaatgctgcagccaaaagatagctttctatttattgattaactttcctttcacatgaattggattagaacaaacagaggtataacatttttttccgaacctcttgggaccagatatgttttagaattctgagtttttatttttcatattttggaaagattatacagtccctatactgtatgtagcccagtatcacaagaatggtctctgagagcataacataatcaaatgttttaatgttctgcagtgaaaagtaaatgggagaagaacagactctaaacagccttatatcagttaaagtagttgtttagttggtagaattttgaagtatctgcctgtcagacgaccagtgaagattatgatgctaaaaattacacatcagcatttacaaaaatggtttacctctctctaccactctgtgagatgataggcaacccaggtattattatacccatttcacagatgatattatggaggcaccagaaaatgggactctcaccccatggcttactaaacagcagagctgacacacaaatcttgtctttcgattctgtccagtgcttttcaactatgccacagttgcttcttattgaggaaagcagcaatttttgagatttgtaaattaacatttccagaggggaagaaaactcctctataatgaagctgtcacaaatcatgcactgtcgtcctggtatctggaacaaagctaatggcagcgttcccacggaggcgctcgtatgcactgaactgtccagggtcagaactcacgtgtctgctgcagagacagtgctgagcccccatgcatggggcagtgagccttcagcacggctggcctctccttcctgtgttcttcctttcttgagaatttttttctttttacatcagcttcatagagctgcctgttatactccaacctgctctcctctctcagaaggggggatctcaaatcaagcgtttggatttacagttttttttttttttaaacagagttttgctttgtcactcgatctgatggagttttgcactgccagatcatgcagtggcgcaatctcagctcactgcaacccccacttcccaggttcaagtgattctcctgcctcagcctcctgagtagctgggactacaggggcctgccaccatgctaatttttgtacttttagtagagacggggtttcaccatgttgtccaggctggtctggaactcctgacctcaagtgatccacctgtctcagcctcccaaagtgttgtgatcacaagtatgagctaccacgcgcggcctggatttataaattcaatagcaaatatttctgagagtgattttcaggcacagtattaccgagcaaggcatttacgctgagtggattgattgggagtgaatgtagtgtgtgcagtcttctttcatatgatatttcttgctttttcgtctgtcttttccacaggtaagctacatgagtgtatagctttgtatctgtggtgttttctgatgcttccccaatgttgataacaggacccagcacatactatgcacttgccaaatacttgcttaataaatgaataattatttaagccttttatctttaaaagataatgcctttcagctctgttaacaaaactggtttagacaataggaagcagacagggagatttttgaggcgagtaggtagttttaaacatgccctgtgagaatactcatcagaggttattataatgatttttatgtaatcttctgttaagattttgttcacttcatgaggacaagaaactcacatatacctggtgcatagtaggtgttcagaaactatttactgagctcacgttccatccaggtggagcagccccgttcctcccaggtcctccacctcacagctaacattccctgcgcctaacatggcaagcgtggaagactctggagggtgaaaggagaggcagctgcctggggaccttgggacttgaggcatgaggtgctggtggttctctgagtttccttgttgccttgttgccttagacacatgcattacacggcacatgtcctaacaaggagctgtaaaaacctctaatctggaactagcaatggacacagacacaaaatgctccaagaacagtcctgtttcctccaggcatagggctgggcaaattgtggcctagtaacaaaaaatgtgttggccactcctgtcccaatgcagccacacaggaatgagaaaagcacccccttcatcacctggccctccagctggtttcagcgggcagaatgaaaggtaatgtgcatctccaccgctgctccactcaagcgttcaggtgctcaagttccgctgtggggtggtggtggcaggcctcagtaggagctgatcctccattccctgctcagcagtgacaggtggtacactgatccctgcaacccgtgcagtctcagcaggtctagcgtggagctaagcctctaccccaactcagcatcaggtacttaaggagggtgagagaagctgtgcaagttaactattaagcatcaccccacacaccctttcagtcaggcacagggaggaactgaccttcagtcccaagctgcagctacaaagcaatgggagtcagcctcccctcccccttcctggtggttgtaaagtgcatactgaagctcacccctcactgagaagcagcaaggggagaggagtcagtgcttcccttttgccatgatagtgttggagaagcccagcataaagctgaacacacatacccagccggcctttatgctccacatccacaatgggtaagcccactaaaaagagatgcataggatgcaaaggtcttattatatcatacccaaaatatgtgggatatacctgaagaccatttatcatacttagaaccagcagaatcacaacttgaatgagaaaagccaattatcagatgctaaatcagagatgaatgtgatgttggaataatctggaaaatattttaaagcagctagtcataaaagtgcttcggtaagtaattttgaattctcttgaaataaatgaaaaaaaaaaatagaaaatcttagcacagaaataaaagagccaatggaaagcagagaactgaaaaatagaataaccaaaataaaatactcattagatgggctcaatagtagaatagagatgacacagaggaccgaatccatgaacttgaggacaggtcaagaatgtagccaatctgaacaactaagaaaaaatagattggacacaacaacaatggacccaaagggacctgtgggacaagactgagaggtaacattggtatcatcagaattcataaggagatgagaaagaaggttgggctgaaaatgtttgaagaagtaatgtttgacagcatctccgatttggtaaaaagcctaaacctataaattcgggaagctgagtgaacctcaaataggataaatgcaaataaatttataccaagacacatcataaataaacttgtgaacattaagttaaaaaaaaaaagagagaaatgagggaatacttataagggcaggtgaaaatgacagcagtcattcgaaactatggaggctgggaggaagtagcaaatttttcaatcaccaaaagaaaagaactgtgtacagcaaattttgcatctggtaaaaacatccttcaaaaatgaaaggaaaatcaagatgttcctaaatgacagaaaggtaggaaaagatgttagcaaacctgtcctattggggaagagctgcataaaatattctaaacagaaataatagaataaaaacccggactttagaaagaaaagaatgttggagcgcagaaaaataggggcaaatataatacacaatcaaacttctgttgaggttcatatgtgatggttgatgcaaaaattgtaactttatgtgctactcagtgaatgtagaagaaatatgtaaaacaattacattttagaagtagaaaaggaaaggaacctaaatggaagtaaggtttctacacttcaaagtatcatatatgtacattgtgatacccatataaccactaagaaaactatccaaaatgagatacagaaaaacgttagaaataaatcacaacggacttctaaaaaatactcaacctataggaagataagaaaagagagaataataagaatataggaaaataataaaatggcacgtttaacatgcatatcaataattatgttaaatgtaacagatctaaatataccaattaaaatacctagatttatagaatgaatgaaaaaaatgacctaataatatactgtctacaagaagctcacttaaagtgcaatgacataagaggacagaaagtaaaagactagaaaatgacatatgaggcaaacttttttttattttattttttgagatggagttttgctcttgttgcccatgctggagcacagtggcatggtctcggcccactgcaacctctacctcctgggttcaagtgattctcctgcctcagcctcccgagtagctgggattacaggcatctgccaccattcccagcttatttttgtatttttagtagagacggggtttcaccatgttggtcaggctggtcttgaactcctgacctcgggtgatccacctgccttggcctgccaaactgctgggattacagccataagccaccatgcctggccaaggcaaacgttacttttttaaaaatgcaggagcgtctgtattaacatcagacagagcatatttgtattaggtgtccagggctgcagtaagaaagtatactcatgggctgtacaaggacacatatgcctgtcactcacgcatacatacattgccagtgataatgtaaaacaggacagtcaatgtgggaaagaatttggcagtttttcataaatctaaatatgcaggtactatatgctgtgttctaaaattgaaagattggttgggtgacaggacacagcgcactgaccctgagttagaaagaagctacgactctgttgctgacagctctgaaggagaaggccaggccaccagcaggaccacatgggatcaggtaatggcaggcaggagctgcaggggacgaggtcagcttatgtatggaaagcatttagttaattttctcaggatccctgtggattggagagttggaataatttcagtaggttccagggcactggggcagtcccttgttgtctggtgcctggccctggagcaactggggtaggcaggtagtggccctggagtgtgagtgcccagtaagggaagtggttgggatgggaacttcaacttgatctgcagctcaagaagggagatctgagtggcttctagccagaatctccaaactgggttgggatagcatcaaaacacacacacacacacacacacacacacacacacacacacacaccaccctgtatcacatgggcattgtttccaagacaaatgaaaaattatgttcacacaaaagtctgtacacaaatgttctttttttttttttgagatagagtctctctctgtcgccaggctggaatgcagtggtgcgatctcagctcagcctcccaaggagctgggactacaggcacacgtcaccacacccagctaatttttgtatttttaggagagatggggtttcactatgttggccaggatagtctccatctcttgacctcatgatccacccgcctcagcctcccaaagtgctgggattacaggcgtgagccaccccgcccagccccatagcatttttattcataatcaccccaaactgaaaacatcccaaatgtccctcagctggtaacagatatcgaaccgcagtccatctgtaatgtgggacgctgcttcgcactgaaaaggtgtgaactgtcgatgcacacggcaacttggatgcatctccaagaaatggcggtgatgaaaaaaattcagtcccaagagatcgcatatggtacggctccatttatatggcattgtgggaatgacagaattatcagagtggagaacagactagaagtctacacgggtcagcaaagcagcggagagaggatagagctggatgcgatcatcagaaagtaacacaagaggtccttgcggtgatggaaacgctgtgtgtcttgactgtgttaatgtcgtatcctgctcacagtgctgttctatacttccgtaagctgtcgtcattgcaggaacctggataaaggtacccaggattgctgtatttttcttacagctgcatgtgaatctgtgttatctcaagagcttagagtaagggaatgagaggagaaacatggcaccctcaaagattattagagaaggttctatttccaaagattagaggatttccaagaggaaactactctggaaaggatttttaattgcatttagggaagccagtgtactaagagctgagacaatcagtgctcagtgtagtaatgatacagctacttcctaactcctttctgggtgctataaagacaaagttaattgtatcattactatttcaaaacaactgaggcttttaaagtgtttcttaggagtgttacaagcctgtctgaagtcctggagagcaatgaagtgtagatccaggaggctgcagtcaatgcagtgtggtggttgagagaccaggccctgaaatcagacctgggtcaaatttcggctctaccagtttctggtcttacgccctttggcaagttagttaatcttttgaggtttaattcttacatgtagtatgagaactgagaagtaataactgtatctatactgaaggagtgttataaagaataaatgagataattaacacaaagcacttcataaatgctctacaaatgccagctttgctgccgttgttagtattataattagaagcaggagcagtagtggtgcagaggaatccagagacaaatttcgtctttgtttctaacagcatgatttctagaaagtcacttagctttgcagacctcagtttcctcatctagagttttagtatgttggagtagatagtatgtaaagtatcttccagtgtttatcttcttggatgctacagtgaactttttagagggaaaatactacagcggctgaaagcacaggctgaggagtctttcaggcctcagtttggatcctgcctccattctgaggcacacaccgctcatggccaatccatgtcctgtgtcctctgccttccttagagtttgccattttgttcagaacagcactgtgagctccctcccacctccccgaccctatgatgaatcatgattgctctaggacaggtcagcagactactgcccaaggggccaatccatccatgttcccaccttctgctatacttgcgttcctgtaaataaagttttattgtaacacagccacccattcatttatgtgtcacttgtggtggtttttccagttctacatgtggagttgagtagttgtgacagggatggaccatatggcctgcaaaccctaactgtttgctatctggccctttacagaaaatgcttgccaccctctttcctaagaacgttatgataaccctgcttctgtcaggtttccagcttcccttgcagctatggggacctgatgattcacctctcccacaaagatgtcagcccgagccattggagcctgctattctccctcctccctgttcctgttggattgtgtgcagttgtttctaagtctagtgcttataggtgtagctaccatcctgccgttataagacagtaaacctggtacaagctaagcagggtggaacagagagagggaggggcctgcattcttgacagacattatcaagttcttgtactggctctggattccctacgtgtagtattttttgttatatgagaaaataatctcttgttttttaaaaaggacttttaaaattatttgttgtggctgcctgtaactaaatgccatccacctattacagactttttactactggtgaaattttgaacaaattatttaattttactaggcctcagatttcctctctgtttcttactttagtaatgaggattaggttagatgaaaaatataaggcttttgctccgttcctactacagaggaagcaaataattggaagttattatttttatttcccaatgaatccattcataattctaaattattttgagtctgtgtctacacaggcccatatctgccaaattaccttttgcaaaaaaccatgttttatttagaaatgctttgacagccagaacatgtgtgtctattgcaaacaaaaatattttcagtttagaaatacttgttttgatcatccgtgtggaaatgaatgttttgtatttgagttgttaagctacaaaatatatttgctaaatgtttttgcaaaaatattcatccatttcttagaataatgccttagagaagcacccagtggtaattatgttcttaggcatgtttatgacacagaacagatcgaaccttttggaaaaatctggaatggaagctgggactaatagcccagtgactctagatgcagggcgtcacctacctcatcacgacgctaatgtttccagggcttgctagttgaatttccacatgacgattagcacaaatccagaactaaatgacaggttatacttctgtctcaagcatcatatgatattgatttttttttactgtaactagaaatttttttcctggagggtcatgagaaaaattgtattttttgacaaaagtataataatttacttgagacttattgttaatgttcagtgatagtggcagggatttatccttttataatccttacattgtttctctttcaaatttttcgtgtagggattataaaaataaacccactggatagcttgtaccttttgctggcatttaggataaagagaaacccaataaatcttgcgtcgagtggcctcactgatattgattgaattataagatcatagtatagcttttacagataagtcaccaggaagacatcacacaatgttgtttatagaaagtaagaaagcaggtcttcttttgtaagattccatattaatcttaacccccgtaacattatactgatatatttttcaagttgattataactctctactacaaggtcaaaataaaccttatattaataaaaaccatatgacttgtctttagacatccaagaaaatttaaaagtaatactttgcgtgtatataagaactttcataatagacagtctcaaaacacttcagaaataaaatacactcatattatagcctggatgtctataggcattcactgggctaatgtttccttccaggactctgtgaccttctagaattactcaaagacagtgtgtttgccctcactggttgattttgtccttcaaagaaaattatttggaagaaaaaattttcaacttattagagaaaaatactcatttctcattttcttatcatttgacaggaagcttaccaatttattgtagataattacaccaatgtttcattccttagaatcacctttcaacatgaattcaaatgtatacgaaaagcaatagagaattctggactttagatttgcaagaaataaaaaggctccaattttcttaagttgttatgattaccacagagtaaaaaatgccatagaatgaaaatgtcttatgttgataggaagaggtcagggctcttactcgaagtacaagataaatcacaggcttaattttggatcacagtggacccctccctccacttcagctgtggaaatacaaagaaaagagttgcattgaagaaacaactggagtccaagtagcactttgcttccgttacaggacttggagcatgttataaatggctcaaaaagtaggatactctctccccttttcagggatctgtataaggaggcagtcatattcaaaatacaaagtagaagataaatgttttctgccggcatgatattttaaaaggaaaaatatgattatctaccatgatgcattgtgaactgatattattgatttttcctcttgtgaccttggttgcacagcaccaacacaaacacacaccccttgctggaaggtctagtttcaggtgtgaatgcgtagaagtcagagatttaaaaaatagggggcttgtagtatttgtttttgccttaattaagagttaatacttggcttatctacttactcattcagacagcgtgggttgaaaatgtattataaggcaggtaatgtgaggcaatgggggtgtctttaagaaggtaatagcttatctgagccttttatcctgcaggattcactatgaccttgcttttccactcccctcccgctgggtctttcagtctgtccccctttatttttgcttactcattcatgagtattcattaaactcctacaatgtaccaggcactcagaatatagctgtgagcaagacggttatgcttcctactctcatttagcttataattgagttggaagacagacattaagtaaatacttatattaataattttattgtaattatgatttctgttcagagacccaacataatttcaagtttccattttttcttaaaaaattctttctgattctaaaactttatagacaactaagaaaaaaataggaataaatcaggaaaaagtaacctaagatatcccaccagcccaaaataacttgttactatttaaaatgctttttcttgcacttttctttagtgtgtatatgtgtgtgtctgtgtgtgtgcacctgtgcccatgtgtatttagaatttgggatcatactatatagttagttttgctattctctttaaatgatcattaaacagagaggatttcttatattacatatttttcaataacatattttaagcttgttgaataatttgtattttagttatgtagcataaattatttgtttatttgggtacatttcagttatgtccttcaatttttgtgcttatttaaactgatgtgataaaaatataaactcttggctacatgttttatttagtctactagataatctagaattggaattacttggtcaaagggtataaatatttttgaggtgattcatatattttatgaaacattatagaatatttatactctttgatctattcaatgtaatatacaatatgaaacattcccctgtattctagaatcgcatcgatttatacatgccttcaagtggtatttgtgtcgagtttacgtatccttggcaccatcgagtattgcactggcaaatacatttctattttaattatatattaatatgatagataaaggtagcatcttggtaatttaatattttcatttatatatcatccagtagtatttcacgtgtgtacctgtaatatttgccagttttctgttgagatgatagccttttttacaaaataaatgaacatattttagacatataataaaattttagatgccatattatatattaatatgacttaatatcttatgtaatagtgtagacatatttcttaacgatattaataatttttgtttttttacaaataaaatgttgtatactcatttataatgctactttgagactgtgtggttatataaacaccaaatttttttcttcattatctctgttcttttgtaaacctgtttttcttttactaatttccctttttgcataaaaatgtcgtaatattcattattccaaatccctctcgttatttggtttgtattgtttcatagtgttacttcctcattctttggaccagtttcaaaatcacaatggacagttcaaaaaacatgttaaggattttgattcgaattacattaaaagtataaatcggtttgaggagaactgacatctttacaacattgccccatttcctccagaagtattatctgtccgtcagctgatccatgcttttctttgtatcttcctgtgacctttgatatgtttttttcatagatgccatgttttttgtgtggctagatattttatatttttgttgctattatgaatagtttctttttattgtttttttctggctataattgttatctttctctcttggagatcatcatcaactaagtgcaagatagtgacaggaggtctagtttcacatccctggagtatctgggaatctattgttatagcctctagattctggcactggcctataatttttaccagcctaatctctgctatcccctagctatgtatactgaagctgcagtgaacacctggtccccgcagccatctcattttctccttcctgcacatttgtctctgccttgaccctgacctctgccccaggactgtgtccatgctctgacactcagctgcatgctgccttgctccctcactcgtcccacctgcatgtgactgactcttcctccagacctttgtggcattttgtttgtatctttcttgggagtatttgtcatagttcaccttttatgatttatgattatacctgtcttgcccaaaagtgtgcccgattggaaggcaaattgtaaaagactaagcactgtgacaatgggaaagtaatttagattgctctttgcctcagtctccaaactcgtataggaatactaagttgtgccctgcccactgcataagacttcgtgaaagctctttgagatgtgagaaaggcgaatctaagagatggccaccgggaggtcacttcccctcctaggttgggcagtgcatgaaggcaaggcctggctttcacagtacttcatgcaggtttcatttagctcaacaccctcctctcatagacactcacagttagattgaatcagagggtggccacgcttggcaagcggggaatagcagccaagttgtagtggacttggccgtgtacagagaaggatggattccaggtagtgaaattagaaattacacctcagtcggggacctctggttacctctggcacttacattggtctggaaagaatgtatttatgttggtggggggggaaaagcatatgaaattgagacagtaggtgatccagtggatgttctaagacattccctggaaaacaatgccactgtcttggtgtgtctgatgttctggggaacatttgaaaaacatccgtctctgggccacatctcgagtttctgattccatagtttgagcccaggaacctacgtttttacaaacatccctggtaattcctatcgtaagtttgtgaaccattgcactagaacaggattcttaatagtgacatgcaggccttactgaaaatgatttgttctgtggaatgagaagctaacaaacacacgtacaaacacacaagcacatttcctagaataggcatttctgttctgtagaatttcttcaagtgtcttcttattgatctaccaaacatgaaaatatttccaggatagaaatgctttcccagaaagcaggtataaaggtgtttcattgggaaacatattagagactctacatattagagactaacagttgttatgatgtgaattttttctgtattactacataagtcactctttcttaattgctaaaaatatttatcagtacctgatcacagaattcttacaagacagcatggtctacttacactaggcgcctcacacagcaaattaaataagtatttccgtctaagaatttgcatcctaaacacttgcaggaggataggaaatggattctgtcattataataggatttaattattcctttccatgattttaaatattatgccaaatagatgctcatcgtagtatacaagtgctgaagaatatgagtagattaaaatcactcataatcctgttttctataggcacccataagcattttctcatgtcttctctttctcttacatatgttttttgttatggagttcctacttgataagctgctttgtaaagattttaaaattcagattatatcataggtgttttcatttatcaaaaacttcgttaaatgtccttttaatgggtgcataatagtttattatattggaggtaccatactttgatatgaatatccttgcagtcagaactataaaacatggagaattacattgttagtgcattaagcatttcaactcaacacagttaattgagacatttatatcatgtgtacattttccttataacatgcacttattattccggtgacataaatcttcagaagtaaacagagaaggcaaccgctagacgtagcctgtatgtgcagtagagggcagaggaagaccagcagtgtaatcacctggaagtcatcacccaaattaccttatttcattctgcagtgatgacacaatcaaagctaatgagcaattttacttttcacttatttcgggttttgcagcatttggagttgctgacgctcattggcttcctggcatcttcttttttgctttcctcccaccgttcttccctgtttcctccttcgttcctctcagcctcttctccgcgttccggttttcccacttgtcccttgttcttatgcaatacttgatcctcttctcactctaaactgtctcctggctgatttcctcttgctcccatgtctttaacttcctcctagagatgatgtcctgccaacttaaatcttattgccactctctccactgtgagactcccctaagctcccaccactcactgtggtccttgttcagatccatgctccactgtgtgatcttggtcatcctccactccttggatcccccaatcacgtgatctctgcttgtacacattgcaccgtatatgtttgctgtgccctgacgtccaagggacacgttgcatatgtggagagcagtggcaaggaatgattgattgcttgattgaccagtaactgattggatcactaactgataggcatgaaaactcctccctcactaattcctatataatcctcatctgagcccaggatttggtgatggtgctctgtaatatgtagtccaactttctctttctcacagagcttacatttctctgtgtttgtgtgtgtgtgtgtgtgtgtgtgtgtgttgttacctacatttaaggttactcaaaaagcagcaataattgtatcttatgtaattattgtctaaatttctaatcctttggtgccgatttctgaaacaatgttaacaaaagtaatcaaaggatgaaataatatatatttaattatttttgagttgtgtcagttcttatattaaatagtgtattgaatttagggactaaaatgtaattataacaaagcaattcactctaagaacatttgattgtttataatactgtagggtgtctaacagtagataggagacctctgatatttaccatagaagttcctttaaaaaaaaaaactcataagtaatacggtttatggaaaaattcatcttgtttatggaatggtagtgcgaaatagaacttgtattttagaaatgctttaaagatcttgaatgagatatactctctcaggttcttaaacataagaatcagaatatgaaaggcatgttttattttctagattttccttctctcgccatttgactaattcttacagtaaaagtaggggaagtgaatgaagtgaacatcaatgatcccatgctaggtttgtttatcttacttttggaaaacaatgataatgattctgtgtagggctgtggtttttaaattgcttgtctgctaattataagaaaagccaagatattgaaatttgtgtagtgctaattactcatccctttctttcccgctgcaatttacagtgtgtcttcagggtgtcagtcactgatttggagcttctgcctctgcttcttctcagcaattaggtctcatcttcaactaatggaattgagtgacgtttagctagtaatatggggaatctgtcttcagctctgcttcattagaagttggtgcgaggccttgaaaaaggtttcctgtttgttgctaagacaatgtgatttgaacttactctaatacccctttttttgagtcatttttgtctcactgtcttcttactgcttgccccacatgattctttgaccatcttcatccccaaatctgaattttgccttaagcaagatgtgcaaaaagtacttggttttacttctaaagctgatgtggtttataacttactcatttcctctccccacttcactcctacagtaggttttgctgcttttattgttgtcaccagtatttctatgtggtaatgatccttgaatcttattttgctgatcatcaatctgtggaagagaaagactgttaaaagaggcctcttaactcgcactttcagaaagatggaattagatggacttttccctttttgtcctgagtacagctaaaaactgtgaacattatatgaaaagcataggaagatactgaacagtggagagaagaaggcagacagactgaggaccttgagacctgatgaatggcacagtgctggcatctctgagctttccgtttctctcatttagcttgcactgggtgttgagaagctaacagtccagttgccagtgggcacagacaagaaaagcacccccaaaccctccccttcctcccaaaggaccacaaaggaggcagcttagaatgacagaaaacttttggacaataaccactctgctatagccaaatactaccgaagaaaactgtggccatattcacaaacccccaagcaaaggctgagcagggagcttagactttcagcgtgacccccatcagaatggtaagaaagaaggatgggtgtggggccaaggcttgtgtctcctcggtgtggtcacgcgttccctctcacggtattggagagagcacctgaggcgcctgaacttccaccttacctggtgctgtcagggtgtcccttgtcctccccactggggtgatatcagaagaggcctagtggagaatcaggattttcccatcttctcagtggtgacaagggccctcctcactcagagcgtcagtggaggcgtataaggagcagtcacagaaccctctgcacctctatctcagctcaggctgctatagtaaaacaccacaaatactggggcttagacagcggacgtctatttcctcacagttctggaggctaaaagttcaaggtcaaggtgctggccagctcatttcttggtgagggctttcttcctggcttgtaaacaaccaccttctcgctgtgtcctcacatggcaggtagagagagagaacaaactctctggtgtctcttcttataagggaaccagtttcatcataagtgccctgtgctcataacctcatctaaccctaattagttcccaaatgtcctatctctaaatgccatctcattagagtttaaggcttcaaaatacgaatcagttggggaggacacaaaggatcagtctataataacctcctacccaggagagacatcagcagagaggcccaggggacgctggagctttcacccaaacctgggaggaacaaggaatcaacttcccactcccaggtgtcaagagaggccaagtggggctcctggatgtccacctgccacctggcagaaatgaagggcggcacttctcttggattcctactagtgcagtgtcagaagaggcctgataaaatagaaggctaaagtaacatacacaatctcataacatgatatcccctaatgtccaggtttctagtgaaaatcattgatcataacaagaaccaagaatatctcaacttgaatgaggaaagacaagaaacacccacaacaagatgatacagatgttagagatgtccgaccagcattttaaagccagtcataaaaatgcaatcaatgaggaattacaaacatgctggaaatagaaagaaaaaagaggccatttcatcaaagcaatcgaaagtctcagcaaagaaatagaagagataatagagtactgaatggaaattttagaactagaaaatttaataaattcaattaatcttgatgatgtactcaacagcagaatggagaggacagggaaaagaatccgtgaacttgaagataaaaaaaatagaaaatacttgatctgaacaacagagaaaacagactaaacaaacaaacctcagagcctcagagatttctgggactacaataaaagatttcatgtttgtatagtcagtatccaagaagaagagaaagagggtagagttgaagaattattcaaagaaataatggttaaagatttcctgaatatggcattttaaaatatggcaaattcgttgaagaattgttcaaagaaataatggttaaagatttcctgaatatggcattttaaaacacataacctttcaagaagccgagagaatcccaagatcaaagaaatgcacatcaagaaacatagtagttaaacttctagaactaaggacaaagaaaaaaaattctaaatgcagccagagaaaacagtacctgacatatagggggaaacaatttgaatgtcatcagatgatctctcatcagaaattgtagtgaccacaagaaggtggcaaacatttttcacttactgaaagacaagaactgtcaactgctaattttaaagctggtgaaactatccttcaggaatgaaggggaaattcagacattctcaaatgaagggaaaactaaaggaatgtgtttctataatacctacccttaaagaacaggtaaaggaagcactccataaacgattttttatttttattaagatgagagttatcttgggacatcaagaaagaaaaaagaacagaaaaagcagaaatatagataaatagacttttcttttccttttgagttgtctaaattatgtttgttggttgatgtaaaaagtataacattgtcaaatgtagttcacagtgatatagaggagatgtttatgacagtcatacttggtgtaggataagggacttaaagaatggtaaggtttttatacttaaactggtaaacgttgatactaacacaccataagccttgtggatataatgcaataattaaagcaaccactaaaaagctatccagagagacacaaaaatgccataggtatgtcaaaatagaatttcaataaaatgttcaagtaacagaaaagcaaaaaagaaatcagggaaacaagaaaacagagaacacccacaacaaacaaacaaaaatggtgaacttaagccccagaatgcccataattatagtaagtgtaaatggtttaaatacaccaatgaaaatgtagagacaatagagaaaagtcgattcatctatacttttgcactttttgttctttcttctttccttccagatgaccccaaatacctcccaccttttttccccttatttctatttttttggtgtgcttccgtcagctattccttaaaggtgggtattataggaacccattctcttagtttttcttcactgataggagattggtagagtaaagaaaaaaaatgtggagagcggacatcttgtggctgtgtcgtgcgcgtgagccccatagggctggggaggaaccagttgccgcgcagggaggaggctgaggctatctacgtagaaaattccaaggaatctatttaaaaaaaactcagaataagttcagtaagatcaacatacaaaaatcaatcacatttctatacagtagcagtaagcgtggaaattgacagagaatacaatactgtttaaaattgctttaaaaaacacttaggtataaatccaacagaacatatacagcacttgatgttgaaaactacaaaataccgatgacagaaatcaaagtgctaaatttgtggccaacatgccgtgttcaacatgtccatgtctataaaaagtggactatgtgtctataaaaagtgaatttttcccaaattgatgtataggtttaatgtaattcatatcaaaatcgtagcaagactttgtgtaggtacagaaaagattgttctagttgggagtggtagcacgtgcctgtagtcccagctacttgggaccgtggggcaggtggattgcttgattccaggatttggggttgtagtgagctatgatcgtgctacagtgccctagcttgggtgatagagcgagaccctgtctcaaaaaaacccaaaaatataaaagattattctaaaatttatgtggttaagcaaaggagctggaataggtgaacagttttggaaaagacggataaggtacaaaggatcactctattcaatctgaattcttacaatataggtaatgtaataaaaactgtgatattgttgtagggatagacacatgaatcaatggaacagaatggggaacatagaaataggcccacataagtacagccaagagatttttgacaaaagcataaaagcaattcaatggaggaagaatagtcttttcaacaaatgctgctagagtggttggacgtgcataagcaaaaaaaaaaaaaaaaaaaaagaaaaaagaaaaattgtatcttgacctacaccctaatctttatataaaaatttacttaaagtgtgttggattaagtgtgaaatgtaaaactgttaaactttcagaagaataaacctctggggtttagaacttagtgaagtgttcttagacatgacaccagagacacagtccataaatgtaaaaattcaataagttggaattcattaaaatttaaaacatctgctctgcaaggggatgaaaagacaaaccatagactgtaataaactatttctaagctacatatttgagaaagtggccatatttggaatacataaagatttctcaaaattctacaattaaaaaaatctaatgctaaaatgggcaaaagacgagacattttactattgtacgttttcttgtgggagcaaagtaaatctttttaaaaagcaactgtgtctttttcaactcacttcttggaagtgatgatggaagtgtgtattcgtggctcctgcagaggttttagctggactttccatactggacatgaataagcacccctctccccctccacattagggccggatagcattcaccactctcacctgcttagtcttctgccccaaactgcttcattcatacctgcttctggaacattttctcgtacactgactccagcacagaggctgttctttctaagttctccctgaattagcagtgatgagatgcctcatgacccgagaaacctggccttggctgttccccatgttggactagtattggagatcacatagtttattgtttcacttgtcattgactagaaaataaattagaaagatggttcaagttcagcatttttactcatggtactccttgacttctgcctgttttgcaaaagagggtctgtagatgacaaaaacatgaaaaagacattcagtggaaatgcagattgaaaccaaaataagagatcactagctattagaacagctaaaataaaaagtagtgacagtaccaaatactcaggaagatgcaaagaaattggatgtttcatgcgttgctggtggagatataaattggtgcatctagaaaatattggaaaatagtagtttctttaaaaagtaaatgcgagactctgtctcaaaaaaaaaaaaaaaaaaaaatgtatgccgacgatacgacttagttctcctgaacgtttgtcccagagaaatgaaaacctgtgtctacacaaaatatgcttctggacattctagaagctttcattgtaatggccacaaattggaaataacccacgtatttttcaatgagtgaataattttacaaattatggtgcattcatgtcatagaacactactctgcatcataaaggagtgagccgttaataatgtaacacttgggtgaatgagtctgaggggaattacactgaaaaaaagcctgacttgaaaggtcacatgttgtatgattacatttatgtaacattctcaaaatgagaaaattatatagttgaactaactagtggatgccaggttgggatgaatgggaggattagatgtgtctattagagtagcaagagggaggtgtgtatggtgatggcagttttgtggctggactgtagtggtggtgaagtcagctacacatgtgataaagtgacagagctatactcacacattgcactaatttcaatttcctgatttttcaatgcattgtatttccttaagcagtatccattaagagaatcagggtaaagggcgcctgattttctctgttctatttttccaatttcctatgaatctataattatttcaaagtaaaatactgtttttttccttgaaaaaggagacttctccaatgtccttcaaaaatatctgtcgttggcttcccaagacgtgtgaatttgttgttgttttattgtgtttttgttttgtgtttgttggcatcaaccaatattttctttattttatttctgcacattttacttttgtttttcatctttttatttcaataacttttggagtacaaatggcttttggttacatggatgaattgtatggtggtgaagtctgagattttagtgtacccatcacctgagtattgtacattgcacccagtttgtcgttttttcttcctcccctttctgagttcccatagtccattatattgcactgtatgcctttgcgtatccacagctttgcttccacttataagtgagaacatatggtatttagttttctattcctgagttacttcacttggaataatggccttcagctccattcaagtttccgccaaagacgttattttgttcttttttttatggatgagtagtattctatggtgtatatataccattttttctttatctactcattgtttgatgccacattttctttatccacgcattgttcgatgggcacttaggatgaggatccatgccaatatcgattttttttttttttactttttaataatggccattcttgcaggagtaaggtggcatctcactgtagttttaatttgcatttccctgatgattagtgatgttaagtatgtctcttgtatatcttcttttgagaaatgtctatttatgtcctttgtccactgtttgatgatgatatttgtggttttcttactgattagtttgagttccttgtgttttctggatatcagtgctttgctggattcatagtttgcaaatactttcccccattctgtaggttgtctgtttactcttgatgattgtttcttttgctgtacagaagctttttagtttaattagatcccatttatttattttcatttttgttgcatttgcttttgaggtctcagtcatgaattcttttcctaggccaatgtccaaaagagtttatcctaggatatctaatagagttttatggtttcaggtcttagatttaagtctttcaccatcttgagttgatttttgaataaggtaagagacagggattcagtttcattcttctacatgtggctagccacttttctcaataccatttattaaatagagtatgctttccccaatttatgtttttgcgtgctttgtcaaagatcagttgattttaagtatttggctttatttctaggctctctactctgtttcattggtctatgtgtctacttttgtatcagtaccatgctgttttggtaactgtagttttgtagtataatttgaagtctggcaatgtgatgcttccagatttgttctttttgcttaggattgctttgggtcttagggctctgttttgtatccatatgaattttagtatttttttttctaattccgttaaaaatgatataggtattttgataggaattgcatgcaatctgtagattgttttggatagtatggtcattttcatgatactgattctttcaatccatgagcatgggatgtgtttccatttatttgtcatctatgatttttttcagcagtggtttgtagttctctgaagagatttttcacctgcttggttaagtatattcctagtgattttattttattttattttattttattttattttattttattttattttattttattttattttattttttattttatttttgcagcttttgtaaaagggattgagttcatgatttgagtctcagtttggtggttgttggcatgtagcaatgctactgattggtatacattgatttttgtgaactgaaactttactaaattcatttatcgaatcaagtagtcctttagaggagtctttagggttttctagttatgtgaccatggcattggcagacagcaataatttgactctctcttttccaatttgggtgccctttaattttttttttatcttgcctgattcctctggctaggacttccagtactgtgttgaatagaagtggtgaaagtggtcatccttgacctatttcagttctcagggagaatacttgcagctttgtgccattcatgatgcaactgtcatgatgttggatgtgggtttgccacagatggcttttattttgaggtaagtcccatctatgcctagtttgttgagggtttttataataaagggatgctagattttatcgaatgtcttttctgcatctattgaaatgattatatggtttttgtttttaattctttttatgtgatatatcacatttattgattcatgtatgttaaacctccctgcatttctggaatgaaacccacttgagcatggttattatattttgatgtgctgttggattcaattagttcatattttgttgaggatttttgcatctatattcatcaaggatattggtctgtagttttattttttgttgctgttatgtctttcctggcttggtaccagggtgatactggcttcacagatgagttagggaggattccctctttctcagtcttttggaatagtttcagtaggattggcaccaattctttgaatgtctagtagaattcagctgtaaatccatctggtcctgggcttttttgttggcatttttcttttttatggagtcttgctctgtcacccaggctggagtgcagtggcacgatctcagctcactacaagctccgcctcctgggttcacaccattctcctgcctcggcctcccaaatagctgggactacaggtgcccgccaccacacccggctaatttttttgtatttttagtagagatggggtttcaccatgttagccaggatggttgcgatctcctgacctcgtgatccacccactttggcctcccaaagtgctgggattataggcgtgagccactgtgctcggccagcaacttttttttaaattactcattcagtctcactgcttgttactggtctgtttagagtttctgtttcttcttgatttaatcaaggagggttatatgtttccaggaatttattcatttcctccagattttctaatttgtgtgcacaaaggtgttcatagtagtatcaaatgatcttttgtatttctgtgctgtcagttgtaatgtctctagttttattactaattgagtttatttgaatcttttcttctcttggttagtctagctaatggtctatcaactttgtcttttcaaagaacaagatttttgtttcattgatattttgtttttgttttttgtttcaattttatttcattttgctctggatctttgttatttattttcttctgctagctttgggtttagtttgttcttgtttctctagttccttgagatatgacattagattgtcaatttatgatctttcagaattttttgtggaggcactttatgctataaacttttctcttagcattgcttttgctgtatccaagaagttttgataacttgtgtcactgttatttatttcaaagaatttttaaatttccatcttgatttcattgtcaattcaaaaatcattccaggagcaggttgtttaatttacatgtgtttgtagttttcaaggttccttttgtagttcatttctcattttattctattctgatcagagaaaatacttgaagtgattttgatttttaaaacatttatcgagacttgttttgtaatccattatacggtctatcttggagactgttccatatgctgatgagaagaatgtgtatctgcagttcttgggtagaatgttctgtaaatatctgttaggtccatttgttctacaggagtttaagtccattgtttgttcgttgactttctctcttgattgtctgtctggtgctgtcagtggggagctgaaggccccccctattatcgtgtttctgtttatctcatctcttaggtctaatagtaaatgtttcatgaatctgtgagctctagtgttaaatgcatagaaacttaggattgtaattcttcttgttggattcatcctcttatcattacataatgaccttttgtgtctctttttttctttactgttgttgctttaaagtctgttttatgtgatataagaatagctacttctgctcacttttgatttctatttgcatggaatatctttttccatccccttaccttgagtttttatgaatcctcatgtattagtctcattgctataaagaaatacctgagactgagtaatttatttttttttaaaaagaggtttagatagctcatggtactgtaggttgtacaggaagcgtgatgctgctcagcttctggggaggcctcaggaaacttacagtcatggcagaaggcaaagaggagcaggcacatcttacatgacaggaacaggagcaagagagaatgagaggggagatgccacacactttaaaatgaccagatctcacgagaactcactcactatcacaaggacagtaccaggaggggtggcactaaaccattcatgagaaacccacctccaaggtccagttacctcccaccaggccctccatacctccaaggtccagttacctcccaccaggccctccatacctccaaggtccagttacctcccaccaggccctccatacctccaaggtccagttacctcccaccaggccctccatacctccaaggtccagttacctcccaccaggccctccatacctccaaggtccagttacctcccaccaggccctccatacctccaaggtccagttacctcccaccaggccctccatacctccaaggtccagttacctcccaccaggccctccatacctccaaggtccagttacctcccaccaggccctccatacctccaaggtccagttacctcccaccaggccctccatacctccaaggtccagttacctcccaccaggccctccatacctccaaggtccagttacctcccaccaggccctccattcaacattggaaattacagtttgaaacgagatttgggcaggggcacatatccaaactctattaccttacatgtcaagtgagtctcttgaagacatcagatatttggtttgtattttctatctattctgcccatgtgtatcttttaagtggagcatttaggccatttacattcagtgttaatatttaagtgaagcacttaggccatttacatttaatgttaatactgcattcatgatactcttccagccatcatgttaattgttgcctagatactttattttatttattgcattattgttttataggccctgtggctattatgctttcaagaagttctattatggtgcataacaaccttttgtttcagaattcagaactccttttagcatttcttgtagggctggcctggtagtgacaaattctctcagcatttatttgtctgaaaattactttatttctccttcaattatgaaacttagttctgctggatacaaaattcttggctgacagttattctgtttaaggagcctcaagataggaccccacatcctttgggcttgtaaggtttctcctgagaagtctgctgatagaagtcaggaatggtttccctccatccatgctggagactgggcatgcatgcaaggcccttccttctgctgctcctacttaatattccccacccctccctgtatcaggttcagcactaggtagggttaaggctttctctgtggactggattgccaggttccctggaggcagtccgtcccactgtcatactcacagttcttcacctggctcatggtgtaggctgcagcctgctgcttctttcaaagggtctgtggtttctttccatttttctgttaaattccttcattgtttcttggaagaaagttaatggtgtgtctctgcagactattttttctttccaagggggagacgcatgctaacactgcctccaatccaccatattgaaaaaaagaagttttcctatttttaaagtaaaatccttttcttgaaattgggcttttgaaacatttgcctaggtactttgcaagatgaaccaaacttctaatatcaaagggaacttggcccaccaaagggtagaagctgtaggctctctcctcctgctgtttgtcatcaaggcccacacaggggtcctggccccagctgcaagatgggctttgtgtgagctcacaggagcaaagcacgtgccaggtgccccgagacttaaatgttctctctgcttttatatcttttcatcatttcatagtttctgaaattatttgacatattacttgactataaaggaaaaaaaatcagagattttattaaaactctgtaaacattcctaattaaacctcacatgttgttcacaaaccttttatgttttaagctgcttcaggacagagaattgattctcctctcatttttcactgacagatctggtggtacttagagccagtaacatgcagcagttaattatgctgctgtcccacatgtgtacattttgttttcttgcctgtatttgttataaagagggttcatgttacattcctctgcaccctccagaatgattaggtgggcgtgagatcctcacatactgaacacacacttagtaactttcttgttgactggttattctgttgtttcatgttattttaatgagactgggaaaaaagccattgctcaaatctggttattctttattaaagttctcatattggaattattaaggactaatgtcattagggacatttctacttttgatatagaaacaagctgcttagggaaaaatctcctgttttcatgcttgacagtgtagtttctcgtagttaaaacaagtctttatgtactgttttatctcctgtgctaaaacagaacggtgaaatctaaggcaaacattgtgtgtgtgcttcgacactctcgtaaattactcttgccattaatttaaccacagttgtgttatcacttgacctaaaggggctcctggatgattgggaaaccagcagagaggctaatgggccaacaatcttggcagccaacctccgtgtatgtcttggaaaattccttcaggatgtttgctttggcatttgattgttcctatcttcagattaccttattttatagtatattgaatgttgcatcattaacaaatacctggttgatatctttattactgtggcttcaggcagtaatacaaagatttttctctaaaatacaaagtgtatttgaaagcttttctttacatgtatatcagtttcaaactttacaattaaattttattcccaggaaactctcaggatgttcttttgtgtattcataaggtataatttgatggcaacttatattatttttcagaaaggaaaatagtttcgtatccaaaagtttgaattgtcttatttaagaaagttgacacactttaatcacaggaaacagtatgatttgacttttctaaaccacataaaagtatttctaaatatttttgcagatctcttcttctctttaaagtgagaataatcttctttaattttggagactgtgctaaccattatctttgctattaaggattagttttgtaactaaatatgtgttgagtcctgggctcacacttcagggatacatcaggagacaagtaaggcctctgacctcgtaaaatttacctgggagagacaggtagttccaagtaaacaaatgaataaacaagatgatgatagatggctgtgaattctatgaaggaaacaatgactcaggtcatggaggtgatagtttgctttggtgggtgatcgggaaggctgctctagggaggtgacatttgcatagcttcctaagtataagaaggagccagagatgctgctggtaccagggctcagagcatttcaggccatggagttgacatgttcaaagagcccaaagcagaaaagctgtttggtcaagaaacaggaagaaaatgactgtggctgtagtatcataagccaggcaaagggtcaaggcagggtgggagagttaggcaggaaccagatcctgcaggccctggaggccattgaggttcttcccattctgagtacagtggggagcttctgtatgcctggaagctgggggcgttgtgatcttttgatttgactcctgggagaccagggaggagccctgccatggtagacttccaggggaaacatctctgtggctgttttcctgtgcgggcaagttactttgtctaaagcccagtttccacattagtgaacaagattaatgatggcatctacacagtagggttggtgtgacagttccataagaacatgcatgtgaaacggttaatccagtgcttggagaaaagcaaatgctctacagcagaggtccgcaacccttgggtaggaaccaggccagtccatggcctgttaggaaccaggctgcacagcaggaggcgcagggtgggcaagtgagcgaagtctcatctgtatttacagccattccccatcacttgcattcctgcctgagccccacctcctgtcagatcagtggcagcatatgattctcataggaccgtgaaccttattgtgaactgtgcgtgtgagggtcctaggttgcacgctacttatgagaatctaatgcctgatgatctgtcactgtctcccatcacccccagatgggactgtctagttgtaagaaaacaagttcagagcttccactgattctgcgttatggtgagttgtataacgatttcattatgtattacagtgtaataataatagaattaaagtacacaataaatgtaatgcacttgaatcattccaaaaccatcccccaaccctctggtctgtggataaattgtttttcatgaaactggtccctggtgccaagaaggttggggactgctgctctacagcattataacgatattgtcatgttgttttaaagatggataggacatttcactgccttcctgaagcgcatggcagtgggcatatgaacagacatttactgggcagtagttaccttgttagagaaatgggtacaagagtatacctgttcacctaggaaagaagttcattctgaggaaagggtcagaaaagtcttcctaaaggagcagagtctaaatgtggctaaataaacaaggaatggccctgcgacttggcccaggtgcccccacaatatagaccccttggaccttcagtggtgccattggattctctcctttggttagtgcactgttccctgaaagcttctgtgagctgcaaacccatatgcctgacacccaggaatgctgattgctgttggccacaagcttgtcttaaggggatgggcaccaaggcgtgcccatgtggctggggcatggcagggtgccaggaggcaggtgctgcgtccctggagaagcagatcttgcacagcggggagcaggctgaaggcaccaggaaccctctgccagcacacccctgagataagcacttccttcaaagctgagtccggctgctcagcgaattgatggatgatgaagacattgtcttcctttgttaggataagaaggataatgatctttctccttccaagtcgtctgggagctcaggctctgtgttgtgataaagtacaattggggttgtttgtctttccatgcttacagaaatcctattcctcaagaaaagaaagaaagagcctacaaagaacttaaaactaagtaaggacttcaaaaaagaaaggtggagagaggggaaaagatgactgctacacattttccctttgcttcccacgggaatggcttcattcttgccttgagtgtcttagatatgtctctcccccacccgcagcactggcttttctgtcttttaccattgaattaggcctggtctagacttcagtatttatacctgagagtacagaaaagaggcttttcaagaatacgtcagttctgttagaataagatcccatccgtcatcagatacctttctacagctttctgtcacagtatttgatcactgatcatagaacctggactagagatttcatgtggagaatgtactcccttcaaaaggaaaaccattcaacaatttaatatttaattgattaaatacatgtgatttgctaatgttaaggtattatagtcacagcccctcacttgttgacaagtcctatatcaagtaatcatagtgattaaaaacaaaaccgagagtcaggaatcagcaaatcaggctttccactgccaaaatgaacattatattaattcatgactttatttaaaagagagagcacctcagaccctaattcaaagactgtttcatctcagcccacaaacatcgaaatatcagatgagaaacattttgagaggcaggtgtgcagacggcagcaagtcgtgagccggctgcctgacagcaaaggaggaagcgtttaaagtatggagccaggaattcaaaacaacaacacgttgacgccatggtgcacatccagggcaacagaaagagctctggacttagactcagagggacgggaaaaactcagaggctgcagatagaccaggaggtagaggccttgatcactccttgtgtagccagacccgttgcttaaaatctctgaacttccttattgtaaaatatgaaggaaaatcattactattcttagaattaaatatttgtgaaaggagctttagaatgatagaagtaccatagggatgttattatcttttttactctcttttcaacctgtcaattacctgtttaaatatgaactagttattcgcccttccagagtctcagtttcctcttaaattaagaataataagtttatcccatttgctcatttcacatcagtcctttaagtgctttgcattttgttacatcttatgtaagtggtgatattagcattactacattgtaacacagtacacaacatctgaaaatggtcctgaggccttcaaagtttaaatgtcgtttaatacactttattgaagcaggtacagaactgctgtgtaattaatttcaagacacttattttctctcaaaagtgcttctaaaacaagtttccatgcttgaagcgttgagtgtcaagtatctgggagatttgcttttgtaggacggttcatttcccacttgtgccagaatgagtcattttgtgtgtaagtgtcaagcttggagaggttctaattaagtgcaaattacaatgaaattaataaatgacaccaatttttagattttaaaatgtgctttgagagaatgcaatgtgggcttagattgatggtaattctcatattttaagttgtgattcaatattatgtagcattaaaactcaattaagtaaaaaataaatgaagaatcaagtagagagaatactcatctctcagatgcctcagcttctccaatgatggcttaaaatctgttaaatgctaaggttgtaattgtccttattgttcactatattccaaaataattgcacatataattagcttatttagtgagagatactaaatcaccctgttcacaaatatactagatcgtcataaattgtacaaatgtaattgtaaatttaaggttttattttactttttgcagatgagctgcagactatatataaattcatgtatgtatccacttaccagaaattttattaaatcaaaatatatttgacccagcattttccgatccgtttacagtgggagaaggtaggctacgtaggttcttccctcctcaggtggcactagtcaagactgacagagccaccagcaactgatagcccaaagatatcctctcagcctaccgaaccagacacccctcaccttctacctggtgatgcagggaagcccagggaagtgcgttctgtcccacaggaggcaatagcagggatagagaaggatccccagaccctacagaacaaaggagaccaggacagctctgaaaaacacattatcattggaactacagcccaaaaaagtaggcaaagtcctataccctaaacccatcaggcaactgccatctaaaataaaagatttaaataggacaaggagtcttaacataatatcgaaaacgtccacagagaatggaaaattactgaacatacaaagaacaaggaaaaatcacaacttgaatgagaagacacaatcaactgaggccaaaattgaagtgagtcagctgttgcaattaccagacaaggattttaaagcagccatcataaaagggcgtcagcagcaaactattcattctccttgaacaaatgaagaaatagaaaaatctcagcaaagaagaagaaattatttaaaaagtgaaagtgagtgaattgaaacattccataaccagaattaaaaactagcaggattagctcagtaataaagtggagaagacaaagatagatcggtgaatatgaggatagatcaatagaatttgctcagtctgaccaacaatgaaaaaggtagacaaaaaaaaaaaaaaaatgaacagaggctcctgtgaggctgtaaccaaagatctaactttaattttattggagttctagtaggagatgagaaagaaaattgggactgaaaaagcattcaaagaaataataggtgaaagctttctaaattgggggaaaaaaaaaactccacaagcctacagattcaagaagctgaatgaatcacaatagaccctaagaaatcaatttgaagacacttaaacttctgtgttgaaaataagtaatttctgaaagctaaggaaaaattagaactctgaaaaaaatctgtcaaccatgaattctgtatttggcaaaaatatcattcaagtatgaggggaggccacgtgttatcacgtgtaatatcagacctgtaatcccaccactttgagggacattgatgagggaggattgcttgaggccaggaatttgaggccagcctgggcaaggtagtgagaccccattgctacaaacaaatcaaaaaattagccaggcgtggtgcacacccctgtagtcccagctactcaggaggctgaggtggagaactgcttgagcccaggaggtcagtgctgcagtgagctattacggcgccattgcacttcagcctgggtgacaaagtgagaccctgtctcaccaaaaaaaaagaaaaaaaaaaaagaaaaaggaaaaatcaaactaaggaaaaatcagataatgtgttgctataatagttaaatgaggtcctccaaacagaaagaagaaaatgatcagagaagaaggcttgcaactacagaaaagaaagaagaacaaataagtggataataggggtaaataaaatacactacttttcacttcatgagtttcctaaattatatttgaagtttgaagaaaaaaaatttaattccatctcaagcagtgttaaatgtatgtagcagaaatacttaagactattagattttaaaagtggggaagggaaaaagatttcagtccttcctttgaaggagtggaatgaggatacaagtaggctgtgataggttatagatgcctcttataacaattagaggaactaattgaccgaaatagaccatatcctggttcataaaatctcaatgaattttaaagaatagaaatgcatagtatgttctgtaaaaataaaggaatcaaactagaaattaacagagagataacaggaaaactttaaacatgtggatattaaacaacttctaaataatccatgtgtcaaagaaagtatcttaaagggaataaaggaaacactgaactgaatgaaaaatcaaaatgcaaaacaccataatttggcagatgcaactaagggcatgctgagaggaaaatttatagcattaaatgtgtatattagaaagagggaagtctcaaatcaataatttaagctcccacctaagaacctagaaaaagcagataataagagaaaagacacaaatcactaatgttgtaaatgaaatgacctatcactatggttactgtagcctttaaaagaatgataggaaaatactacagcaggtttatgcccataaagttgaaaacttagattagctggaccaaatgctcaaaaactacaaagtgccaaaaactcaacctatagatatataacctgaatagtcttaaagcccttagagaaacttaatttgcagttaaaccctccccacttgatatcctggcagagatcatttgacttgagaaatttgccacacatttaaagaagaatttaaatcagttttacagggttttgtttattaaattaagagtaggaaacacttcccaattcatgttgtgaggccagtattattctgatacctggaacagccaaagacagcatttaaaaaaaaaaaaaactgtaaacctttatgtctcatgaatataggtgcaaaaattctcaacacagtaatggcaaactgaatccagcaaagtacaggaagaattagacaccgtaaccaagtgggtgttattccaggcatgcaaggctggcttcatatttgaaaatcaactcatgtaagtcatactaacagcagtccagagaagaaactttatgagcatatccattgacacagaaaaagcgtttgataaaatccaacactcagctggttgcggtggctcatccctgtgatcccagcactttcaaaggccgagatgggtggaatcacttgggctcagaagttggagaccagcctgggtgacatggtgaaaccctgtctcaaaaaaataataaaaataataaattggccagctgtggtgccaggtgcctgtagttccagatacatggtgggcctaaggtgggaggatcgcttgagccccggaggttgaggcccggaggttgaggctgcagtgagccatgtttgcaccactgcactccagcctgggtgacaaagcaaaactgtatctcaataaataaataaataaataaataaataaataaataaataaataaataaataaataaataaataaatatctaacactcattcatgctaaaaattctcagcaatctagttatagggagtagcttcatcaacttcgtaaagagtatgtacagaaacttacaactaatacacttagtggtgagaaggtgaatgctttttccccaaagttgggaaccaggcaagaatgaccgctctcccactcttaacagagtacctaaccagtacaataaggtaggaaaaaaaaaggcatccaagtttgaaaggaggaataaaagtgttcttatttgtggatgacattattgtcttcattgaaaatccaaaggaatttacaaaaaagtcccaagctaataagtgattccagcaagcttgcagtatacaaaatcaacacataaaaatccatcacgtttctatataataacgcgtggaaaccaaattaaaaatacaataatacaatgccatttataattgttccttgcttttcatcctaatgcctaagtcctgggaacaaatcttgtttgtagatatacccaaatctatattataggtatacccaagtctgtatttcatttggggataaatctaacaagaatagaaactattttgaaatttacaaaatgctgagaaatggaagaaatcaaagacctaaaaaatcagagagactttggggatcagaaaacccagaaaggttttttttttttttttttaaatataggtactagacctagacagtctcattctgaaatgtagatggcatagcacaggacctataataactaaaacaactctgaaaaagaagaaaaaagtaggaggaatcattgtttccagtgttaacgcttactgtatcctgacagtaatcgtgactgtgtggtactggcaaaggaaaagagacataggtcagtaggacaagacagagaacccagaaacagacccacacgaatatgcccaactaatttttgacaaaggtgcagaagtgactcagtgaagaaaaggtggcctttacaataattgtagctggagcacttggacatttaggacaaaagtgggtggaaccttgacctaaagttcatatttcattaaaaagaaaactcaaaaaagtatcacataaaataaaaactgtaaaactttaaaacttttaggagtccgggtgtggtggctcacgcctgtaatcccagcagtctgggaggctgaggtgggtggatcatgaggtgaagagattgagaccatcctggccaacatggtgaaaccccgtctctactaaaactacaaaaattagctgggtgtggtggtgcgtgcctgaagtccaagctactcaggagactgaggcaagagaattgcttgaacccgggaggcggaagttgcagtgagccgagatcgtgccactgcaccccagtctggtgacagaacaagactccatctcttaaaaaaaaaaaaagaaagaaaaggaaaactcagagtatctttgggatctaagactaagagaagagtttttaaatttgatgataccaaaggtacgatttacaaaaataaaatcttatcacaattaaaaacttttatgaatgaccttattaagagtataaaaaccagccactcgggaggctgagggaggggaattgcttgaaccagagaggtggaggttgcattgaggcaagattgtgccattgcactccagcctgggcgacagagcgagactctgtgtcaaaaaacaacaacaaaaaaagtataaaaacaaaaactgcagacatggaaaaaaaatttgtaaaccacgtacctgatgaagaactagaatatactagaatatattgaatatatagactactcttagaactcaacattaaaaacctatcagaaaatgtgcaaaatacatacacagatatttcaccaaagaggatatacaaatggcaaacaaacatgtataaagatattcaactttactagccaccaggaaaatataaactgaaaccacaaggagatatcactacaaacccatcagaatggataaaataaaaaagttgatagcaccagataatggcgtgagaatgcagagaaactggatcactcatatattgttagtgggaatgtaacctggtacagccactctagaaaatagggagttgagaatttcttcccaacttactctgtgacccatgggtgcttactttatgatcctttgcaagctactgcattcttgggcatatctcagagaatgaaaactacgttcacacaaaaacctgtacatgagtgtttctagcaccattgtttgtaatagcccaaacctaggaaaagttcaaatatcttgcaatagacaaatatttaaaacacagtgtagtacttccattccatcacacatcgctcataataagaagtgatgggcttctgatacacacaactgggatagacctcaagagagttatattgagtgagaaaagccaatctcaaatggtcacagaccgcatgagtccatttagattccatttatttaagatccctcaagttacacagttacagcaatggagaagagatcttttgttgccaggagttaggctttgggatggagagcaagggcatgggtggggcttaaaaagggagctggagggagcttggaggtgatggaactgttccctctcttggttgtggtggtagttacataaagctacgcgtgtgataaaattgcatagagtgtatttacacccatccatgagtgcaggcactgctggtgtcatctgaatactctctatgaattctcccaacatcagtttcctggttttgatgttgtttggtaaactgtagttactcagcacgatgttggcactggggcaggttgggtgaaggatgaatgggtttcactgtacatttctttgaactcctcgtaaatctaattatttcaaaataaaatgaattaaagacaatatgaatgagagaacatcaaataataaggctttcacagtacagcgtaggcttctaaagtttgggaggagggccttgagatgatttggtaacacctctgtgggtgcacccttctgacgcaaatgaccctctgttgtctcttctgctctaaccaggcatcagctatgtgggtgtctggtgtttccaaaggagggtaggatgagatcagagagtgcattgtgtgctcactgaggaagggggaggaataatgatctgttcccaggattaagaaagaggaagaggagatacaggaccataagaaaagagaacccagagctgagagcttgtaggaatgtctctgctccattctactagggcttagaccggttggcataacaacttcatgaactgtcggccatccttaagctctcctttaggtaccaattatctcctgattttctcttcattattaacagtaaattattttcctttcctctttcctttcctttcctttctgacaaagtctgtctttatcacccagtctggaaggcagtggcaacgatcatgcctcactgcagccttgacctcttgttttttttgtttttttgaggttatttttgtagagccagggtttcaccatgttacccaggctggtcttgaactcctgagctctagtgatcttccttccttggactcccaaagtgctggaattacagatgtgagccaccaggccagcccaggttagcagtaaatcttgctaagattggcccataaagaataccctggcttggtagactgtacagaagaaggggagactcggagaccacgtcctatgccatagccactattagagagacaggagccccaagaacagtcgaagaggagtggagtttaggaaacaatcagaacaatctctctcccctggtatggcagccgcaaggaaggggcaccctggggagtcagcccagggtagagaagtacatttggagcctttaatcagggaagcttgcagggctgcggcactcaccgcaggggacaccaccagggggaaagcaggcaggagccatttgccttccctcctcttcaatcctgtatctatgtccctgtgctgctgaggtccaggagctccttagggatgcactgtgtgtacgcgccttagcacgctgcacaattccggacacacggggtgcttataaagcgctgtggtgtatttagcagcatcctgtagccaccacatggtgcccagacagctgcaggctgaactcaagtgccccaccccctggtgcagaatcctcagatccggggactcgcgcgggtggctcagcaccgccctctgtctgttcttaggtcttgctcagaggctgaagcagggtgggctttctggctcacagggccatctgaccactcccctcctggccattccccctcctctctcaggacatatgctttccccaagatggagaggagagccagcctgaatccttggtgtttgtaaactcctttcacctggaaattgctttacatgttttaaacttcacattactctttgggagaagaaaagaagtaacaagtaatattcaatttcacacttgggaaacaaacagtgaagttaagtaactttcataatgccagatagcatatctgtgttaggaaagaatgtgtgagtccatataaaattctgtcctcagacgtttctcaagtgtgttctaaaataaaaggcttctgtactcaaaattgagctttgtccctgttgaatagtaaattaagagttcaaaatgagacagtaaataagttagaccaagtaagtaagctgcctttgagtatggaggtagagacataaattcgtatgattaccatagaaaacaggcagcactttcctgaaagaagagcaatttttatatcttaaatataagcctttgaaaaatacggtatttgttgataaaaggaaacttctaagggctgctactatatcttgatgacttaataaggggatctccctgtggatggggtaagttaaaagagattatttcttcagtttttctttattcacacactagtagcaaaattagaaacatcagtgagaaaattatatctgatttgttgatataaccttatgaactttccattataaaacctgaaattaaagtatatgttgttttctttaatgaagtttaaagaattggaagaagacatttcattcagttagtaagtaaaagttgtgtgtgtgtgtgtgtgtgtatacgtgtatatacacgtacatatacatatacacgtgtatatacacgtacatatacatatacacgtgtatatacacgtacatatacatatacacgtgtatatacacgtacttatacatatacacgtgtatatacacgtacatatacatatacacgtgtatatacacgtacatatacatatacacgtgtatatacacgtacatatatatatacacgtgtatatacacgtacatatatatatacacgtatatatatatatatatatagagagagagagagagagagagagagagagagagaaagagagagagagtctcacctgttgcctaggctggagtacagtggtgtgatctcggctcactgcaacctccgcctcccgggttcaagcgattctcctgccttagcctcccaagtagctgggattacaggcgtgtgccaccatgctcagctaatttgttgtatttttagtagagacagggtttcatcatgttggccaggctggtctcgaactcctgacctcaggtgatccacccaccttggcctcccaaattgctgggattacaggtatgaaccactgcgcccagccaaaaattgctgtatgaaatagttatcagtcaggagcaggagctcacacctgtaatcccagcactttgggagactgaggcaggaggattgcttgagcccaggagtttgagaccagcctgggcaacatagtgagaccctgtctgtacaaaacataaataaaataaaataaatagttgttattctattgtaccatcaccttattatgtctgagcagtatttgtttgatgtaggctaaaaggtgagaagagagaaacagaaaactgtgatcatgattatgccttccaaggggcctaatattgaactgtactaggtcgactattaacagactaaaaatgtttgaaagcgcatatgcaacaaaagtggtttttatcccaagaaaagccctggataggctgcctggtccttgggttgctgtcttccatgaggtgattcagagacacgggctgcttgggtcctgcagttgtactgtctaccagctcgcctgcagtcagctttcggaaggaaaaaggaatgaggagggagcccacctacctcttacaaccctggactggcctggcccagaagcatcccatgtcatttccaccacccttccaccgaagagaacttgtcacatggccatgtggccatgcctacctggaaagagggttggaaatacaattcctggctggggtttaaatgtgtattttagaaatgaaaatagattttcgtggacagccagctcagctgcctcagaggccttcttaagctgcattagcttagactttcttatttagccacatcctgattcaatgtgaatgggcctagttgttacttttaagagaaagatagatctacagagctgaatcctttttcagtagatagaggaagtaactttctgaatagagttcagttaagaaggaattgctagggactttcttgctagaagaaaatctgccctcatttgtactagagaggtaaaagaatgcagggttcaaggaagacggactttcacatggtactcccagcaatttcatgagatccaaagcacatggatctcaggactttgagtgaggaaggaactgtccttctcaaagcattgcagcctgataagggctgaaaaggaggagggacttggcagaggacctgttaagtaatcctctggctgttcgccttgcaatcagaacattgtgtaggtttgataaatttcatgtttttcaaaaaaattctctattcatagttacacaagaaactgtgatgagatccccttaagagaatattaatgctatcaatacagttactattattccagcacctttagctcactcttgccactctttggcgctctactttttaatataaaccatacatagagagacaggagccccaagaacagggaggctggccaagctggaaaaataatcaaagcattctctgtccctggagccccagccgtaagtggacaaacttcagttgccggaagccaagaccactggagagaagaaaattgctagtaccagtgtgggagttgtactgtcgtcttctcttttataagcatggtcacgaatgacatgtgatttgaaaccacaatttactaccgtaataaagtttctaaaattactgcagtcggactccaatcgtattgaacagtcaattgattctgggttaaaacatgcttacatcacaaaataatgaccggtttgagaaaaataaggttgtcttcaggagccaatatctcagtgcaagacggacactattaaaattctttaggggaaaataaattgctgatttgctaagtgtgcttgaagcaatatcaccttacatctgcctaatgttctttcctcacagcctcccagtgaaataggtaaagcaggaatttcgactttatagagaaggatctagggatatgagaatccatcatgtgagaacattttagataagtagcggaacccaattcataaaactctttacactgctccaagtaaaacagggcagccagtggattgacacacactgtttttaaagaccagatttagaggtatgctcactcaaatctgttaattctgatcagtgtgaagaacgaagttagtgcttttggatattaagatagttggtataggcaaacaatgaaatttaaaagcagtcactcgactgtaagtatttctttcttacaggaaactgtttttgcagtcttatggcaaattttgaggcccaactctcacccttttgcatgttttcctgtaggaagtaaatgaattctttgttttgtattttgttagcactttctaaagtatttgttttcatttggttttatccattgcaaggcaattgttactgattttattctttgtcgttgaatcatctccaaggttataagttatgttaaaaaacaacttagcctttaatgcttcaaaaactttaaaaggtgggtagtgggaacatcaaccactgtgttctctcatataatcgggagctgggagaaatcacagcagattttgacagtgtcctcagtaccagcagaccttcctgcagaagggtgtccaaacttcctgggctttattcctctattaaatgttctaccaactcccccaactcttctctttactcaacccttgacatgaaacacctttctactgtgtagtccattagggtgtaaatcacaccaaagaatttttgctcaaccactttgctagatagattggaaagaaacaccatttattgcatactaatcaaactgtaattgcctgtcttcctgataaattgaccatgaataaggtaggtctctttgactgacagtcttgggaatgtgcattgcagtctttataggcatgacatgcttctgataagaaagcaggcttgctgtgaggaaggaaacaatgtttccctcttttgaagggactgattttcacaattttcacttgcatcataaataggtgttggcaaaagtatcactcactgattatgtacatggcagatagagaagcatgttacttttagtttaaaaaacaaccttgttgccatgttgatttaatcagagttctgtttgtttgtgtcttctcatctaatgtgtaatcagaaccccttaataggaagtggtttcattccattgctctgtattctggagagaaagtctgatgttggatttatcattaacgtttgccatcagcttgtcaccaccaaagccctctgaattattttctgtgctctctataaggctggttctgctctgccatcctctttttgccagggagagaattttctttttttttgagacggagcctcgctctgtcactcaggctggagtgcagtggcgccatcttggctcatggcaacctccacctcctgggttcaagcaattctccagcctcagcctcctgagtagctgggattataggcacacaccagcgcgtccggctaaattttgtatttttagtagagacggggtttcaccatgttggccgggctggtctcgaactcctgacctcgggtgatccacccgcctcagcctcccaaagtgctgggattgcagacatgagccaccgcgcccggccgagaaattttaaaatgagtcaccaggaataaaatatattaaccaagcgaggtccaccgtttattcagattttcctagtttttgctcaatgcctcctttctgttccaggatcccatccaggataccacattacatttagtcactgtatttccttaggtttttccagtctctggcagtttctccaactttgctcgttcttgatgatcttgacagtttgaaggggcactggttaggtattttgtaatatgttcttcagttggatgtttctgatgtttttctcatggttagactgatgatgagtttgaggaggaagacagcagaagtgaagtcccactctcataccatgtgaagggcccatgccatcagcatggcgtgtcactgttgatgctgaacttgatcaccgctgaggtagtacttatcagctatctccactgtaaagttactccgtttctctttgtttttgtactacttctacctattttaactctagctgtcctgcaagtgctgtctcagggttcactccttctgggtatcttctcttaaatctgaccaacttagtggaatgtttcaccacagacataatttcaaatagcccagttattgagaattgcattaggaaggaaggcgggatgtgctcaccacctcttagctgagtgactccctctgtgattccatcacatctcacaactgtagtcttttacacatgaataaatccccaaaactcttcccagcatttctttctggtcaacagtggagaaaggccttgtgacattgagaagagaagttggccatgtagtcatgagttagcaaattccagtggctgtttctttttttgagacagagtctcactctgtcggcctgactggattacagtggcacgatctcagcttactgtatcctccacctcctgggctcaagcagttctcctgcctcagcctcccaagtagctgggattacaggcatgtgccaccatgcctggctaatttttgtatttttagtagaggcggggtttcaccatgttggtcaggctggtctcaaactcctgacctcaggtaacccgcccactttggcctcccaaagtgctgtgggtccgtgagccaccgcactggaccaacagtggctatttctaagagacctatctctctaaaaaaaaaatctctagaaaaacttgtatttaaaaattatgaaggcaactcgagggagaatataggatgccaacggtgtctcctgaccttagcctttgcgattaggtgctgattgtgtgaaatccggcttgatcatttgctttaaccatactgggcaacattgtccttgcctggaggatgtttatatttattttaccatggcatcaaactttttaggatattaataaagtttggatgtaagatctaatgaaattaagtgttctttatcttaggaaaacatcattttgttttgcatttgcaggcggagttagcatttagatattcaggtttgggactatgaaggtctattctcattctggctaatatataattccttaacttaatggttctgttgttgaaagtgcttgctctagcgctgtattcctacacagtagcctagactattggtcgagggggaggatttatcccttaggaaacacttaacaatttctggagacatttgtggttgtcacaactgggtgggggccacatttgccatcttgtgagtgaaggccagggatgctggtaaacatcctgaaattcacaacctctcacagcaaagagttatctgacccacaatgccaacagtgctagatatgggaaggttaattggttggccacattacctttgcttcttgtctggggcagctttccctagaccctgaggcatgttgtatatatacttaattttgttagatcatcccagagaacatctgcggccctaggtcagcttcacaatgagtctaacttctagatcagtggtttccattgagcctgtgtgaacacgaagatcttttttaatgaccagaatttttagtcttataatttttgagctcttattatttaagaaccgagaaaatcctcggttctcggccttttggctaagatcaagtgaagaactgagaaaatgtgtgatgatgctaacatacatgctatctcgcatgcagtggctgtggatttagtaacatatctcgagtaattttcattttgttgaacataacatttggaaaacagtagtacatatatatgtatatatgtgtgtgagagacccattatttcattattcattctacagatagtacttgggtacacatggatttgatggcccctagcaggaaatatttgtcctcatagagaaaacagcccacagcttagggaccattgctgatgaggatccctttgaaacagagatgacttggagaacactcacatctgtagctgaaacaaacagtctaggaaatagggaagggcatctcagcctcacatacagtgcccacttattaaatttctgcaaatgatgggaggtgctctgttgtggttttcatgcctgttgttaaaggaatctgacagccgaggcatcaggctgctttcttcagccctggtgagagtaggagctctggagtgaagccagtgaatagaactttgccaagattctgaatcttctgggaccatctgtgtctactttttcaaaaagcagattgtgtgaaatgacaggtgggtaggacacagaaggtaatagagatgtgaatgagaagactctaggaagggagagagcaagtacgggtgccagcgggaagagcccagcagaagattgagtgtcctggcagcaggactgagaggatgaggtcacaaatggcttttttctctgggaaggaagccagtggtgtgtgagttgtggcttgggttccagatcttagatcagttttccttacacacaatattaacgttcatattccttccaggaaactatcaagagtaaatggatcaacaggcagccaattggaagagcctcagacatagcaagagggtggcatggagggagaggacatataaccctctctttggcagctgtgcctaccacactctggccttgaagattctgctttggctcccagactagagacccttttgcatctttgccatcagtctttttggaatacagcatcaggcctaaggtcccagatgaaccttaggacagctttcattttgaaaattttggttctcagttcacattttctagctttccattgagtggtgtatcagttagctgttgctgtgtaacaaaacccctctcaaatttagtgacttcaaagaataactttttgtgatttgtgccaagcctctgggttggctaggtgtttctgctagtctgcactcactcatgcatccatcaccgcagtggcagggtgacgggcggagagctggtcaaggatggcctccaatagatccctcatgttcttccttccacttctttacatccttccataaggttcacatgggcatgttttcctggcagtgggtccaggagagaaagaaaaaacatacaagtgcttctacaagctgctgcttatgtccagtttgctgctgaaccattaggaggcgagccccgggaccgtgccccgagtcagcgtgggagggcactgtcacaatgtggagccactgatcccatcactctgccattgctggtgaaatacaaggaagccagctgacagcttccgacgagttgccagatgacgtttcttctgctattctttcatgtttagtagtgtcgctttgtagcaacacgttatgtcttaatctgttttgtggttgagatgcacctgagcaggcatctggactaggtgttttaagtagctaatttttctatctcttggtcattttgtcgtctcacctattgtgatggtgatagagccccaggaatacaaacaccatattccaatacagcatgttcagaagaactgaataaaaggcatacagatttaggaagaaggagaaaaaaattctccatggagaagaacctcctgcttattttaggttttattttattttatttttttgagacagagtcttgctctgtcaccaggctggagtgcagtggcgtgatgttggctcactgcaacctccacttcccaggttcaagcgattatcctgcctcagcctcctgagtagctgggactacaggtgcccaccaccacgcctagataatttttgtatttttagtagagatggggtttcaccgtgttggtcagggtggtctcgatctcctgacctcgtgatccacccgcctcagcctcccagagtgctgggattacaggcgtgagccaccacacccagcagtaattttatttttaagatggaagggtgaatgaaggaatatttgttagcagtgactacacagagttccagtgggctttctctgtgttgaagtaggtaggaaggtgtagggaattggtaaactccgactattttttgttttgtcagtagagcgtgggaaaacggctgattttcaaattgttgtgatgaaacgaatgctggggtatttataggcatgtgtaaataagaagaatatatctttgtcaaaaaacagccaccatgttatttggagcttttttaggtagaataaagtagaactttctaaaagtccgaggaaagatagaggaagattttttaaaaacttgacaccattaatttctgctttgtccaattcatatttatagcatttgcatccatcatctctttaatagttcggttcggtctgagctagttatttctttcacatatttccttttttgttcagtgctaataattacacttttgttctcttactggcaaaacattgcattgtcctcgggaagcattcaaagagactgagcagcaaacgctaattaatcctcgcagtgtgtctccttcattcctttaactgaggcgctgaaatgtctagccacacatttaatgaaatataatttggtgacagagagggtacgaaaactttaattcaagatgccatagcagcttcaataagcctcatatggccatggttgtgaggcagttcaaggctttaaatatccttgagatgcaggtgtggtgactagattatctttctgtgttattctccctttctgacagcagtcatcctgacttgctgtggagaatgagtttatcttgagtggaagttatcctggagtctagggaggcaacctagtttatagcaagtaatcttgggagttacaggcttgtgttttgtttccgtttttgtcagttgtctacacgttgacaagtgacttcatccctgggaatcattattgcttatcaccaattaaacacaatggatattaggtagttcagtgatgagcttaaaagagtttgacaagtttcttggaaagaacgttaggtaactatggatggctccctgtgcaatgtcttaagtctttaaagaatattttaatttattaccttatgtccttaaataggtcccttgaaccaaatttagtatcccagaatatgcattgtcctaagaacttttgcaggatgacatggaaacagatactataattgggaagcctcctaaatatgtgcaggtaggtagtggttataaattatctgtagcgtctcattcattagagactatcttatgagttagtgtgcatgattgatttgtagaaactacagataataagaatgctgtctttgctttaaccggattcatacagtcttctatccagggctggaagttacaagttgccctgctctggaggtccgagtgctgagcagtgagtgactgtagacgtgtggcaggcattcctccctccttgaatcccatgtttaaggtctgtgtttacctctagcccgcgagttccaaaagctatgtctgtctcacttggctttgtttttctagcccttactacagtgactagtaatgaagtaagtgcccaaacacagatgtatgaaataaagagagaaatgaaagggcaaataaggaaactggacgttgcttctctctgttgtacttaaggcctgttgcttcacggcccttccctacaggaggctgtaacactcataacgccgattatgactattgtgagaacaaattggcttccagatctgaacagaatcgcacataagaatcacctaggaagcctgttctggagtctgcccagagctactgaccgagatctccaaagactgagcccggagagctttttattttcaaaaggctcccaagatgattcagatgtaagtgctctgaggattcatgctgggaacagatccagatctgctgtaagccctggctgtgccctggacccacagctcctttccttgcccaggctccccgtgagatgaaggctcgtggaacacatctcatcttcttcatggcaggtaattggaatcaaggagctatagttcccttacctatagtaacatgctgaaaattaaaaccatagttgttcttacatttctttgtatcattaggtgccccactgccaggcctattagcagagacctaatacataattggtgttctggaagaaatggaaggatggatacatgaattctgtgacttaaaaatgaaatccacatggacatacctagatcaggaagaatgttgaatttgtctttacacaaattagcatgaggaaatacttctaccccaaattaataataggtcctgaaatccatttttagactttaatccacttatagatggtgttaagaatgatccttgaaaagggatgtactttagtatttgtctgttgtagaattgttctttaactatcaagtcagtacttcagggttaaacattacaagttcaagatactatctaagattagttaccatctgcagcttaaataatgtgtcccttcccaaactccgtcaaatgaaataaccattaattaaaccccggttcttttccaattggaggaaggctgcaggccaaattatttttgtgatgtatgggacatctgtaatgagtgccgctcaagtgtacctgaagcccttcatcctcagtgcataggactggagcagttgaacagcctctgtcttataaacagattatagtattgttaggattagccagcttttctttggcaatttttttcatctcaagtagtccatattttccaagttcagcacgtagcaagcagtcagtcctgttcttggctgaagtaagcagtctgccttgagtgccctgtgtctttcattctcccgacgtgcacatcccctatgtgttcctcattctccccatgggtcagttaagacctctgtaattacagaacgctccctcaagctagtggagaatgtataatttggaatgtagaggtatctccagaatcatagggcaggagtccagctccattaattgcttttactacatagcagcttgtttcttctcaacttaaaaaaaaaaattaattgtggtagaatgttcataacataaaatttatcatcctaaccattttatatataattcaatagtgttaagtatgttcccattgttgtgcaacccatctttagaacttttttaccttgcgaaactgaaaatctgtacttgctaagcagtgactctctgattccccttcccccacagccccaggcagccatcattctactttgtctctatgagtttgactactctaggtacctcatataagtgaaggcagagagtattttgactttgtgtgacagacttatttcacttggtataatgtctccaaggttcacacatgtggtagcgtgtgtcagaacttcccatttaagactgaagaatatttcactggatgcatagggcacggtgtgtttacctgtttatccctccacagacactaaggttgttcccacctttttgctattgtgaatgatgccgttatgaacgtgggtgtacaagtatctcttcaagaccctgtcttcaattcgtttagatagatactgagaagtattgttagatcatatgataattctatttttaattttttaaggaacctccatactgttttccgtagtggctgcaccattttacattttactttcccactgacagtgcacaagatctccagtttccccatatccatgtcaacgtttgttattttgttatttatttatttattttctaaataatggccatcctaatgtgtgaagatgaacctactctctcattgcggttttaattccattttcctgatcattggtgcaacttagcatcttctcatatgctttttgctcttttgtaaaccttctttggagaaatgtccattcaagtcctttgcctgttttttaatcaggttatttgtttttctcttgttgaattgtaagagttctttatatattctgaatattaaccccttataaaatatataatttgccagtgtctttttcttattccgtaggttgcattttgaccctgttagttttgtcctttgatggcacagaatttttaaattttcatgtggtacattttatctacttttattctcacacttaatatataatctagttacttcttttattttctgttcttttaaaaactttataatgagacattaaggttttgttttgttttgtgagacagagtcttgctctgtcgcccaggctggagtgcagtggcacgtctcggctcactgcgagctctgcctcccgggttcacgcccttctcctgcctcagcctcccaagtagctgccatgcccagctaatttgttctatttttagtagagatgggtttcaccgtgttagccaggatggtcttgatctcctgccctcgtgatccacccacctcggcctcccaaagtgctgggattacaggcgtgagccaccatgcccggccacattaggggttctttttagctgctatccccagtttaattcctctcttccccactactgtgggagtttttctaagctttactgaggtatagtcatatatatgattatatatataaggtatacagcgtgatgctttgatatacatatgtattgggatattattatcaaaattaagtaggcacattcatcacctcacatagttaccattcttgtgtgtgtctgatgagaaccactaagatctacttttctaacaaacttcaaatgtacaatacagtattattaactgcagtcaccacgctgtagcttagatcctcagaacttttgcatcttataactgaaagtttgtaccctttgacgaacatctgtgcctcagccttggcaaccagcattctactctctgtttctaagagttgtacttttttagatttcacatataagtgagatcatacagtatttgtctctgtctgattccactcaggagaatgccctcaggatacatccatgttatcacaaatggagggatgtctttctttccttatggcggaatagtattctaggtgtgctctgcagcctggtggagtggcaggctgtgccctgcagtcgggtgggggaaccctgacaggaccccctgctgggcagggccataggctgggctccgcagttggaccggactgctgtctgggctctctggtcaggtggtcaatggggttgctggttgatctccctgtttgggggtggctgcaggctgtgctctgccgctaggcagtgctgtggtctgaactctgtgccctgggtggtgcaggggggcgtccactgtgttccatagctggtcagggtctctggctgatttcaggctatgctgctctgctaggtggggcttggctttctgcctgaggagagctgtaggctgagccccagggctgagccagactgctggctggggactgatggtgggcagagctggtgactgccctccctggccagatggtgacactggttcagctctgtgggtgcagtgccactggctgcgccttctggtcaggcaactccactggcagggatttggtgccaccactgagatacacgagctagttgctttgagccccatccttctttgttcctagccaaccccaggtggtcttattttcccagtgttcctgtgagacaagacagaaggaggcatcctgggaagtaccctgcaatgctagggaagctggatgtccaccttaggctctctttttccctactggaaaaacatagcttaggggaagtctctttgtctagtgctctaccagactggggaggggcagcatgaccaaaccaaatccctccactcttcttacccttctaatgaaacttttcttggtttctgtggtccaaggggttggttctgcctcatccccttattctgggatttccacaaaggtgttttgtctatagatagttttgctagttggttgttttgtgaggggacgaaagctggggacctcctcttctgccgtctttcttttgttgcctgtccttttcttgttacatccaagaaatcactgctaaatccaacatcgtgaatcttctctcttatgttttattgtaagtgctttcaattttaggtcttaggtttaaatctttgttctgttttgagttaatttttgtatgtggcgtaagataagggtccaccttcattcttttgcatgtggatgtgcagttttcccaatgccatttactagagactgtcctttatccattgaatggtcttggcacctttgtcaaaaatcatttggccctatttgccagggtttatttctgggctttctaatctattacattggtttgtatgcctctctctgtgccactactatgctgttttgattactgtagctctataattcattttgatatcaggaagtgtgggacttcctatcttgttattcttttgcaagattgttttggctttttgaggtaactttaaattccatatggcttttttatttctgcaaaagaaaatgccattaggaattttagcaggattgtattaaatctgtaaatcattttgggaagtattgacatcgtaataataagtcatctgatttgtgaaatgggatgtctttccatttgtgtcttcttttatttctttcagaaatcttttgtagttttcatagtatgagtcgtttgcctcctttcttaagtttatttttaagtattttactctttttaatactattgtaatgaaattgttttcttaatttccttttatttgttgttaatgtgtagaaacacaactgttgttcattgtgttgattttgtttcctatcattttgctaaatgtgtttattctaacaggttttttgtggaatctttagtgtgttctatgtataagatcaattatttttgtttttttgtttttttaaaatatttccttatttttttcttatataagatcgtttatctaagaatagaggtaattttacttcttcctttctgatttgcatgcctgcatagctaatccttggttgactgtttttatttctgaactttaaatagatcatcccattgccttctggattccatagtttctgatgagaagtcattcattcatcttatttgctgttcttttcttgacaagtaattgttttcttactgctttcaagattttgttctttgccatttaacagctttacttttatgtagctgggtgttgatatctttgcatttatccttcttagagtttttgagctgcttacatatacagaccattgttttatattaaatttggtaagtttacttcattatttcttcaaatacttttccagtattctttctgttactttcccttccatcttctatttctattagttgtgtgttggcacacctgttggcatctcatatttttctgagactcttccttttatttctctttgttcttaggattgagtaattgctattagcctgtcttcaagttcagtgattctttttctgcagattaaaatatactgttgagtccctccagtgaatttatttgttattttaccttttaaccaaaattaatacttttaaaataattttcatcttttaatattgtttgttgagacgtagttctcatactttaattctttagaaattatttatcttttaaaatataattaggatagctaatttcaaggtttttttctgtaaagtctagcataccttaggggcagtttctattgattgctttttttcccccgtgtatgctccataccttcctatttctttgcatatttcataaatgttttttaacaactgggcatttgaatgatataatatggcaattttggaaatcagatttcctaccctatgcagaatttactttttatattgcttctgtctgttaagtgaccttcttaagataattctgtaagatatatattctatgtatgtttagcctctgaagtctcttgtcagttagctaagtggtcatctaataactggatacaggtttctttaaattatttgagggataaatctccaagcctttgggaagggacttgtgtgtgtgtgttgaggcttgcctgctatgtgctggcaggcagtttacaaccctccacttgcttgcttagagccagaggtcagtcagaggtgacgtacactgtacgtcaaattgtatgtcagtctgtcatgccagaggtgagatattagagccttttccagtgctttttctggacatgtgcttagccctgtacatgtgtgtgaccttctgaatttccaggaataagtcagagcagttcagaatcccctatggccatgtcattctccagtttttccatttaaggtttttggtctgttgcttgttagccccagttcatattgctgcctcagggaactgtgatattgagcatgtgtcacagattgtttgccctagggatagggctttttgcacagatacaggtcagatttaggtcagatacaggcaagcctaagaatggagcttttgaaggcagcttcttgacagataaaatagtaagaattatctgtactatcccccttagtggcttcaaggctattgtttttcacagctcctgtagttgcaagactgttggttttcaagggtcctgtggaactagtggaaggggtatgggaatagggcaagttaaaacactttatagtttgcttattcttaacaagattcgtctgtttttcttgaataaacagtacttagattgttgcaagcctttgattaatttttagagttccaaaaatgttgatttcacaatttttgtccatgttctcattgattttatgaaggagatgattttcagagacttttattctgccattcctgaggtccttcttttctcagatgacattttgtggttcatagcaaccatagaaacattctgtagttcatcaggtgtggacacagggaagggtcactttgtatagaaaggctatcagggacctatccttgtgattaatctacctgttgcctccctctggagcctcatggaatgtggtgtctgtggattatagaaaacttggcttccttggccacatctccttgaaaattccatcctgccacctcctgtataccaagtggatgtgctgagcactctctgaagtgctaagaaatatgtcagagagcttgctgggacagtctttccctctaaccatgggactggccagtgtgttttgagtttttccagccaatttttggagtaaccaaaactttaggaaggccctgtcagcccacctccctcactggcacactaagcaggaatccccagccccctgttctcccagctcccaggggatgctcttcatctttgctctgtgatcctgcagtggtctccttgtgtgggaatcgtgcaccccactggccatgccatatctgtgtgaagcttattttagctgtcctaatcagagcatgattaaaacaattgatttttaaaactgttgtgtatgtattttatctgtgttattcttgaatattggattcatattaaatagtagtttgccctaattaactttaatactacagatttgtgctttttgaactcagcatgcagatttatgtaaattgcataaagcctttaagctaggagtgtatcatttacatttacaatcccatttatcccatgtctccatatcactgactcttcaaagaaagacaggaactattgggatggacgtacttgattgtttcagtttcactcctgtgcaaaccaaagaacaagtagtaaatgacttttccacataaacacacacattcacacacacacacatagatgcttgtgtgtatatacgtgtgtgtggacctatctttggatgctcatatatgtgcacttagagaatcaaaagcaatatccaggtatcttgaccataagcccaataccctgtctatttttttgagtggcaatttgtgttcccatattgtagtgtgcatatatatatatatatatatatatatgctgtatttttaaactgattttagaattagcgcttaaaatagaaaagacagagcacaaatttggggggggagcagtttaaattttgttttcatacatctggttgtattaaattctctgttcctctttttttttttacccccatttctttgcccttctttcttccctttcctccccaatgttttccgtatctctggcaaagttcatgacataaagggctgtaagagatcagattatgttaccccaaaacacaccactctggcatacagattacattgagctgaaaacagttaagaaaaagacacaagatgagctctctgccttttcccgtctgcctgaaacataaaattttccttgtgaacgtgttcctcccagctctacttccggtaaggagaatttcccagaaaaggagtaacagcctcattactggagatgagaggacaccagaaagggcttacacaaaccagccctaggagccagccatcatctcccatcagtttctcccgacatttgcatatttgccttcatacagtctgccacccctagaagttcaaagtccatttcctttgccatgtcacttctctttagcatttttgtcttttttccaaatagtataaaagcttccaagcacagccattcttatgaagtcctcctcccacccctttctgtgtaaaacttttaacaccaaataaaattatatactttttattccctgtttgtctgcctgttgtcagtttatttcacagacccagtcacagaaccaaagagggtggaggaaagtttttcctttcctacaaggtcagtgtccttttggatagaggtcgaatggatcggttattggaaaagaaacccacagagaaatatgttagaaaggaatttttgcaagcaaagaaccaaacaaacaaatagcaaattgtacgtcatcagtggagactggttttctaccagatgaatgaccctcattaacatgaggaagcatgtatggatattcagtacacatggtcctacttattgataggcatgaatttgattgtacggaactttcctggagcaatgtacgtgttgtgtgtcaggaaaggctctgttcaggaatgcgataggccttgggtgccttgaatgggagagtaatacgtaagcagaccaactgatgggaaaagtctcaatatagaggtaagagagggtggggagactcatgtgaggggtagtttaaaagaggcagtctgttaagcttatgcctggacgtaaatagcagatgaatttggagttagaagaagtttcttggctttcttggtgaggtttgagactcgggttctgtggcggtacagtcttgctaagtcacagatttttgaacccaaaacattcagcccattctccttgtcacaactctcttacctcttttctcatgtaggcttctgtatacagagctagaactggcaagttagagtggaccttttactttaattgtggaaggagggcaagcagcccctgagaaaataagagtctctaacaaaatgcacttataccctccagacctgtctactttaccagaatgggtgtgccgggatacagaataccctagtaccacaaaataacttcaactgcaaacaattaaactagtaagtatttaaggaacatttgctatgtgccagaaactgcttagtgctggatatgtattagtcgttgtaagtagatgtcggaggaggaggaagagggtatatatcaccactgtgtgtacgaaaaaaatgatataaagagttgaaccgagtggcatgatgagaaaaacttctgcttggatatcattgtatgaaagggcgatgcctggaccttactggccacaagttagcagctatctgcccccatgaatggatcataaaagatgtcttccaatgtgctgacatcatgtagccacaggaccaatgctggaagaatttcctgtggcgttattatcctgtgtaattaataagacactattaatcaacagcttgactcacagattctgtgacttgcatccaaagcccactactggatgtctcaagtctttgccatctctcactttatttcaatagcctcctagtttgttcctgcctcaggatccttccgcttgctgttcatctgccttgaatgctattcctaagatttttccatggcctggtgccccactttatttagttggtttctcaaatgccatctcccaagaaaggtcctcttcatccaaaatagcccccctccccccatctctccaattactgccgaaccccttacgatactttgactttctgcatagcacgtatcactacctttctttccatatatacatttagcttctttgtctgttcattgtttgtaatgtctattctattataatataagcatcattttgggcacagacttcatctgccaaacatatactaggtatccagtaaatccgatcaatgaattcatacagtataacctagcaaggaatatcatcaatgaaaaaaagaaaagacacaaaagacctaaaagaaataagaagacaggccaggcatggtggctcacgcctgtaatcccagcactttgggaggccgagatgggcagatcacaaagtcaggagatcgagaccatcctggctaacacgatgaaaccccgtctctactacaaatacaaaaaaattagccaggcgtggtggcgggtgcctgtagtctcagctactcgggaggctgaggcaggagaatggcgtgaacccgggaggtggaggttgcagtgagcggagatcacaccaatgcactccagcctgggcgacagagtgagactccatctcaaaaaaacaaacaaacaaaaaaaaacaaaaagaaaaagaaaaacaatttaaaaatagaaaacaaacaaaaatgtatagtatatccaaaataaagaactgctttttttgtggttatgcttttctttttccctcacgaaggccaaatctcctgtgtgcttcaatagaaatcagtgatgagaaaaaagtagcaggtatcagattaaaccggcctccatgtgatgatcatctgttagctttagtattgtctcaaatgaaaaactcacaaaacactccaagttccctgccattgctgaatttaatctttggaatgttttgaaccccgtgcatgaattatatcaattttacttagggaaggtcctgtggtatctcaaagtcacttagctcagtttctctaggttttgtgggaatattaccctttaggtatgtaaataatatttatttcaaatcaaaatcataagtgaaatcctaaagcattgctattaaatgtctaggctaaaatgaagatacctgcttttgccactactattttgaaatgtagactcacaagaagttgtaaaaataatgcacagaatcctataaaaccttcaccccacttctgccagtggtgaaatgttgcataactggagtgtggcataaagactgagaaactgacatttatataatactgttaactagaatagaaacgttactcagttttcactggtttcagtatgccctcatttgcatgtgtgtgtgtgtgtgtaaataattctaaattctatacaatttgatcctacgcatagattcatttaatcgcctccacaatcaagatgtgcaactgatccgccatgacagaggaactccctcgagcgacccctataaaactcccctgttgcaccccctcccacctcattgcccctgccgtttaacattgttttcaaatgtctagccaatataattagccaagataagtagtagtaacactattggcaaagaaaagtgagaatgaaacatatcattatttgcaaatgatatgtttatctcttgagaaaaatccaaaataatggattgaaactattaatttgagattttctgtataattatgattaagaacatacactctgaagcctgctatgtgggtttggatcccagctccaccacagactagctgtcagtcctctgggaaatcacttaacctctctgtagaggtttccctcatctgtaaagcagggctagtaagagtacctacctcactgagttgagaggattaaagaatataatacaggcatacctctaagatattgtgggtttgctccagactaccccaatttgcaaatattgcaataagtgagtcacatgaattttttggtttccagtgcatataaaagttatgtttatactatagtttattaagtgtgcaatagcattatgtctaaaaatttacataccttaattcaaaaatactttattttaaaatataatagcaatcacctgagccttcagcaagtctttttgatggtacagggtcttacctcattggtgatggctgctgactgatcagtctgatggttgctgaagggtggggtgactgtggcaacttcttaaaataagacaacagtgaagtttgccccatcaattgatgtcttcctttcacaaaagatttctctgtaatgtgcactgcttgctgctcttttacccatagtagaacgtcttccaaaattggagtcactcctctcaaatcctgctgctgctttatcaactaagagtatgtaatgttctaaatcctttgttgtcatgtgaacaaagttcagagtgcctccaccaggagtaggttccatcttaacacatcattttctttgcttatccataagaaatacctcatcattggttacagtttattatgagattgtagcaattcagtcatgtcttcagactccactgctaattctagttctcttgccgtttctaccacatctgcacttacttcttccactgcaatgctgaacccctcaaactcacccatgaggggtggagtcagcttctcccaaactcctgttaatgttgatattttgacctcctctcatgaatcccgaatgttcttgatggcatctagaatgatgaatgcttttcagaaggtttttgattgacttttccaagaccatcagaggagtcatcatccgtggcagctatagacttacaaaatgcatttcttaaatagtaagacgtgaaagtcaaatttactccttgattcataggctgcagaatggatgctgtggcatgaaaccaacattcatctccatgagaactcttgggtaaccaggtgcatgatgtaatatataaattaggaaactaggagagaaaaatccaggcatgataatagaaaattttgcaaacagtgtgacacagaactacctaggtaaatagatggaaaaagtcattctcactggtaattagaaatgtattttataccataaccaacatttagtttctactacccaataggcaagtctttagaaaataatgacataacaaccactgtctgtgtgtacttgtaagggtggagtaacatgtttgtgctattttcttgcaatatttattgaaggcattcaaagtgtatgtaacattctgacagttaaattttaaagaattctgagaattgattagatgcactgtggcttttgtttactaagattttatttatagtcattcttttatttagcaaatgctgtcgtgggccttgtctatgcaggacagcatgctaagcactaggaatagagtagtgatgaaaacaggaagacaagcattaaataaatcatggggcaaagggaaataatcactagtgttgaaagaggaagtattgtactaggtagctgagggcctgtaactagaggatttaacttagcctggggtgtgtgtgtgtgtgtgtgtatggtgaggggttttcactgaagagttgatgaatgttgaaacgcagaggagtggtaagaggcagggaggagggaagggaggattaaggtgtgaggtaaccagcagcagaccctgtacagggaggctggaggctggagcagagagaggacatgacggggtgaaaggtaactctggagatataggaaggggtcacagcaccttttaggaaaatctaagattttagccaggaaactgatacgaaaaataatgttttcaagggagatttagtaatacaattataatgatagaatattagtatatatttgattatactgtatatcacagttactatatgtgttatagtatgtatcatgatcattatatactatataaccattaaatgatattttaatgataaatgatgacataatagttaatgctataatattaaacgttgaaagcagggtacaaaacagcatgtttggtttaatcctaattttgaaaaggaaaaatgatgtatctaacatacactgaactctaaattgtttttacggtgatttttctgtgtagcaggatagaggctgcttttttatagttcctttatttcccggattctctaaaaatgaataggtgttactgtttacttagaaaaattgtactatttgagaaaaacagatttagtttatcttggaacatttcattgaatagcctgtatatattataacgggcttatggaataatactgaaaaatatccattaaatggcgagtagtcaggtccagtgttggcttttgtccctgtgaggtctccttcactgtgtatgtttccattaaggacccttaaggttcagagtttttgttgaaatacactattcagtcacatggatctgggaggaaaactgaaaccagctggccttgggcagttgctttagaaattctaatacatgttcagtttcctcatgcttcatgtattgaactgtaaaaattctcttttggttaccatcacacaatcacagggcaaattaaatctcatccctgtttcatttgactgggaacaaaaaacaaatcttaaaatttaagagtacttggtacaaccctataattactatacataaatccaaggtttcaggtaccgaatgcttttgttttgagattacagcatcaccgttgttcaggtaaatatgattcatcctgtccagacaattttttgttgttgttctacaggaattcattgacaataataacattctagtttgtggtaggtttcagtatactaggaaaaaaaatcaaccaaccaaccaacccaactcacacttagatggagacatgccagtaatgcgaatattttcaacagagcatattctcactattctttgccttcagaatttaatcagatgatataatagataagtacatgaaagaaggttaaggagaacatcacctcttttttttttcttttgagagggagtctcgctctgtcacctaggctggagtgcagtggcataatctctgctcactgcaacctccgcctcctggtttcaagcaattctcctgcctcagccttctgagtagctgggactacaggtgtgtgccaccacgcccagctaatttttttcttttttgaaatggagtctcgccctgtcacccaggctggagtgcaatggcacgatctcagctcactgcaacctctgcctcccaggttcaagcaattcccctgcctcagcctcctgagtagctgggattacaggcgtgtaccaccacgcctggctaattttttgtatctttagtagagacagggtttcaccatgttatccaggctggtctcgaactcctgacctcgtgatccgcccgccttggcctcccaaagtgctgggattagaggtgtgagccaccgcgcccagccgaacatcacctcttaatctgatgtaagaaaagtaatcaaagttctgatacaaggatagaagtgactgctgcccttcagcctcttgcccctgtgccagctagctcatagttaaaccttggtgcagagagagagagaaagcacctcgtgggctggcattctagtgttctggtctcctgtattctaatggtagtcatggaccctacaaatcccaaggcagaagctgtcttggtgtaaaatagcagcaataaaaattaatttagactgagtcagtactgtaaagaagaaacaaaaatgaaaacaaaatctcacctttcccagctgtgtgaatcaatataaattggttcaacatgagctcttgttagaatctgggtgtttttcacactttgtaatacaaagctcacataggctttacagatgatggttaaaacgtgtgtgttagggtccaataagtgacttctttgcctagcagaaaattcacctcatttattgaacaaaattggcaaaaaatgtttcactctgaatgtttggttattttgactggttcaattaaaaatcacttcttcgtatttgtttatcattgcaaaagaggactggagagttagaacttacatctctaaaagaaggtgtttgatttaatcagaaaagtgactatttggagaacaaggactgggaaagaggtgttaattgcattggagaagagtggcaaggaaactaaaccatttaatttcgaagtctactatcctgtgctcaatccacaagcaggtaaagaatgtaaatttataatttatatgcactgccttctataagtaatgttagagaatcaactcttcagtgatacttgttaaagaccagtaaggaagactttatttaggaccattgcaataggtataggaacagcgggattttgcagtgggcgagagagattgagagggattgcagagagagattgagttcaactccaaaaacagcataggccagtgggaattcatagccaaggagtagtgtgggggtcagcggatggaaaatgagcaagaggaagcatcagcgctctgactgaactgatttaactgagttctttgctcaaattggattttccaaagaaatatgcagataagtctaggagaaggttcagaagccccactgaagtttggccatgcaaagaatctttgtcagtaaatactagtgaaataaatgaaatctgatagagacaaataggatacgacaatctctaatcctgccatgtctttacacctttctcttttgcactgatcctgcttcagttgtgaaactgtgcctggatgtagcgctaacagcacagaagaggtatatgtcaagcctgtcctctttatgcgactgttttacctccctgcgggtgcagaatctttaccttttgagaactgtctttttccttcccaagagtgggcctgccccccaccatcagcaataccttcgagctccaccctgcagccactgtcacaaaggaaggctggggaccttcttgctgttgttggtcccactcttcctccagtcgctgtgtggctaccagcctgagggctcttgctcctggcattacaggacattcaagcccttactaaaataaaactgacattttagcctgtgttttttatgagtatttcagtcttctgaaggtctgatgatccttctcaaggtatcaaataagagagctaataaactaggatgatgcccctctttacttcctgtcctgtaaaccttgaagtcagcacctcccttcatgaatccttgctgctgcgtcgccctctccaagatgctgcctatggcaaactaaatgtgagagatagaaccagaggacaagatagaagaacttcggcggggggtggggggaggagggaggagggaggaatggggagcagggacagcactctggagagtggtccagtgcctccaatgcttcaaagcctggccatcccgtcattgcccagtaaggatgctttttacaggcctggatcatggtcagggacaattctgatagccacaccgacttcctcttcaaaggtcctttttctcaaaagaaaccatttagcctttcagggactgcagtaccgagctctgtgatccagcacagctgacagatgcggaagggggttccagtcaaggaggcttccaaccagtgccctgaggtcaccttgcctggtgattgacacccttgggctccagatagccctccccttccatttcctctgaggaccgctcccttctgaaagccctgggaaactggttttctacttcctttctttttctcattccgtgatgaaatttgtgtggttatatctaatattttgaaacattacaaacaatggggaagagacgaaagatagtgtttcatgggaggtgtatttgagataggcagaagaggaaacaagctttcagccaatgggaaaagtactcctttggccttctatgattgacatttcagaacaagcttttgggagaaagttaaccaataaacactttctaagttactgcctgtattattgaacgtatattgcacttttcgttttcatcttgcacaacctgataggtgagcctgaaattggctctgttaactgttctccattagcttttattcactcttattagggactgcagtctatgtaatgaatttattggatcaattatttgtatcttaatgcatgtttaggacttcaaagacccctttcttttgatttttttcctcatttaaatagttttctgaacatcacagttttggtgccttcactttgatacataattactattctgcaagtgagcttaatacttttaatgccatctgacctcaagattttaatagaattaaatgcaaacaagatgaggaaagaagagtcatggggaaacttgacttgttactgagctttgggaaaaactttaaactcttggtcaaagtgattttctgttaagaaatcaaaaacgtgccagcagatgcctttaaagacaacatttatagaaattatttttttttgagagtttgattttagtattctagcatggatttacgtcatctgatactggatagtataatcttttttcctcatcctctaaccctcaattcttaaaactccgtgaatccatttctttctttgcatttttattattgtgcatcatgagactcatcttcaaaggcaagagccttattattgggaaacaattgtgtagtaaatgcttatttgttatttctctctatagttttttctctatatagtatagtagtatctctattatcttaacacagtcttggaaatacccacagtatttgtaataaatgtataataagtatgtcaaatttattttctatctaaattttgttgttatctcagtcttaaattccatccctcccaaattgctatttctccaccctgaaagataaagggtagcccacgttgatactactcggtgtctgcccaatcacaggaaggcactgagatctttcaatgtactgccatcacatcactaagatgggtgaggtggggatcaaaaattgagagaactaggatggcggcaatattttcaggaatggtcattaataagctagttatgagattgtcatatttaaatttcatgactgtttttcaacctgaatgtatggaaataaaaattataaaccctcttcattttatgaaccttatttttgaatttccctggaatctattgctattaaagccattaattccttactgtaaaacgtcactatcaagaaaaagctaaaaacatcaccatcagtattagagatgcaagcatgcaggtttcctaaactgaagagacattgccccttaatgagcctttacaaaacaagagaagatcatttttgagcttaatattagaaccaaaaagagaaatgcaaggcagtagcccattgcaagaaagaaaacaggaatgcactcagccaggttgcagtcacccccagacaggaaggttcttgccgtttattgcagttgcctctgattcctccctcgaagtctgggagccttaagggtgaacagcctacaaccaagccacgttctcccgacaattctgtaaacctgtttatcacaggcaaattttcaggtgtctgactatagtgggattttttattatcaatgaaatgcatgaagtgacaggccttggttggtgaagtggcttttgtagactgaatatggctgagtatgtacagccaataatacattttaaaaggcatgtttccacgtagctagaattgaatacttggtattactgtccttattttcttctttttactgtatttgataaaatacgtccatgagaattcagcattctctataaaataaaattttgaaggaaagtagaatgaaaaataattaatgatttgatgaggaaaatctaaaagaaatgtgttatttctaggcaggtcctcttggctttccattcaggacttctgcccaaaccatgaaagcaaatgactaggccatatggaaattggttgtaaaagatgttttagattagccagtcactccaggagcctttgatgttatgcaggctaatgaagttggctcttggagaggtttttattcagctgaactgaatttctgagagattcatattacattttcatacagttgtcttgcttcataccccagggatttattaagttataattgaatattgtgtttttaagaaagtttcttaatgtattacacccttcagcaaattttgcttggtattgttttgtcaagataatttaattttacattggctaatttagcccatattaatatttcccctgaaattcaggtaacttagcaaactgttacaggtggtgagaaagaaaactcttttattgaagcattaaaatgttacattattgtgaggtgaaatcttttatcagcctttggagatattctatcaaggtcagtaacattgtatctgtcaaagaaaagttttactccaaaagttgattctcctttcctcagtatcccctgttccctgcattctccagtgttcctccttcctcccatctcttcctgtcccagggaagttctccccggattgctgactggagaaacagcatgacgtggtttctaagtaaggggaaggggggtggggggcggagtactcccttgtcagtggtaacaataggctgtgaataattcagacatgatgaaagaaagtctcatttgacaagatagtacccgattcactaaacagctagtgtggaaataatgatggcgttagttaggggaatacaagaagttcaaaagttttggtggttttgaaagggaatcgcagcacaggggccttcaccagcttcccttctaatgttcgtttgttacgcctggagtttcttacattactgattacgtctcacttgggcgatgttttatctaatttctggaaaggctttgttttataaagtgggcttgcttctgtggaaataaacaaagaccaaatgagaacaaacagaggctatttattcagagcttgctataccaagggagccatcctttgctcttggcagagactcaaaggcagccagaggggtgggaaagcttccaagtgaaagaaggaggcttccagctcactctgattggaggctgttggcctggggaagccggaagtgggcttactagaaagggggcgtgttgtgtggttggtgtggggagcgtatttggcttcctctgattggccttgagttggaaagggttggggagcgaaaatagggacgactcagtcactggccaagtgctgactgttcggtgcccatgactgcagaggttgtgttttggcttcctgggtttctcacgcgggtgggagttgacatacacggtctggccattgtctgtctgcatagtccgcctcactggatactgagaaatttgcctggcagtgtatgaactggataaacttgagtgggaagtctaaaattatgaaggatatttggacagaatacttaatttttttaattcgtaccccacactattcactctttatgaggaacagagtctgataaccacctccacagccaaaatacagaacgtcatctcaaaaaagttctccgtgtcgttcatttgtaaccaactccttccccccaacccctcaccccaaacaaacgctgataggtttgtttgcccctgtaattttgttattttcagaatatcacataaatggctacatgcagtatggagctttttgaacctgagtcccttcacgtggtatagtgcatctgacacatgcatgttgttgcatgttttgaatctgactcctttcacatggcatagtgcgtgtgacacatgcatgttgttgcatgttttgaatctgactcacatggcatagcacgtgtgacacatgtatatcgttttaactctgactcctttcacatggcatagcacgtgtgacacatgcatatctttgatgttttgaccctgactcctttcacatggcatagcacatgtgacatatgtatatcgtggttttaaatctgactcctttcacatggcatagcacatgtgacacatgcatatcattgatgttttgaacctgactcctttcacatggcatagcacatgtgacacatgcatatcattgatgttttgaacctgactcctttcacatggcatagcacctgtgacacatgcatatctttgatgctttgaccctgagtcctttcacatggcatagcacgtgtgacacatgcatatctttgatgttttgaccctgactcctttcacatggcatagcacgtgtgacacatgcataccattgatgttttgaacctgactcctttcacatggcatagcacatgtgacacatgcatatcattgatgttttgaacctgactcctttcacatggcatagcacatgtgacacatgtatatcgttgttttaaatctgactcctttcacatggcattgtgcgtgtgagacatgtgtgtcattgcatgtgtgtcaatagcatcactagtttattccttttttttttttaaagaaaatgctcaactttatatttcatttcaacaatttgctcctaatgcccttttcctgccccaggatcctatctaagaccttgtgcgtgtagtcatgtcttcttggtctcctccaatctgtgaccatttttactctttctgtactgtctacaactttgacccttttgaagagtcctcgtcaggcatctttgggtcgtgtccctatatttgggtgtatctgttgtttcctcatgcttagactggggttatggattttggggaagaatcccacaggggtaaaggacccttttgatgatatcatatcgggggcaccggtcatcaccatgacttattcctggcgatgcgaaccttgaccctttggtgagggtggtgacagttagggttttccactataaagttaccatttttttttccgtatcctattcttgaaaggttttcttttctcaccagctgaatatgtggtgtttttccatactgattctccaactctctgacaccaactgggtgtcctgcaattcaactgaattacaaaaccaactcccagcgttagcacagaccccacacattgagggctcaaaactacccccacttcagatcccaggtgtcctcatatacatctgacagactttgaatcggggttcccaaaaccccctccttgggctcagtaactcactagaacagctcacagaactactcaggaagtcactttacttacttcctttttttgagacaaggtctctctctgtcactcaactcctggtctcaagcgatcctcccttgtcagcctcctgagtagctgggacctaaggtgctaccatgcctggttaattttatttaaaattatttttaatagagatggggtctcactgtgttgcctaggctggtctcaaactcctggcctcaagcagtcctcccactttggcctcccaaagtgctgggactacaggtgtgagtcaccaggcctgaccaggaagtcactttactttctatgaccaatttattataaaggatacaactcaggaatagcgaaattgaggagatgcatagggcaggtgtgggggagggtgcagtactcccaagctctctccaggcgcaaggtgccccgtcctcccagtacctctgtgtgtccaacaccccggaggctcttccaaccccattgctggagggttttcatggaaggttcattatagaagcatgactgattaaatcgttggtcctaggtgattgaactcaaccttcaggccccctcccctcccaggagactggggagtggggctgaaagttccaagtttctaatcaaggcttggtctttctggtgaccagcacccatcctgaagctatctaggggcctgccaagagttgccttgttagaacaaaagactcctataacccttatcactcatgaaattccatacgttttagtagctctgtgccaggaactgggcacaaagaccaaacgtatctttctcattataccacagttccttagaagcaagttgtcaagtccagcccacagtcaagcagagggcagttaagttccactctgcagggaagagtatcaaagaattcgtgggcatatgttaaaaccgccactgtacttaataaatattctgagggatatactttgaggcaatgcaaatatctgtttttcctaaactttcagccacccattttagcattcggcagtggctcttgcttacagcatttctatcgtaatgttctaacggtgatttttctcatttccctcattcttcctacatttgttttttggaatttttctgtaaaggaaatctgtcccatctcccatttatatattcaatcatttatttatatcattttggatatatgaatatttatgttattctctgggttataatcttctatttaggttggtgcaaaaataatggtagtttttgtcattaacactaatgcgaaactgtaattatttttgtaccaacctaatagatttaatttgtaggtcaaatggctcctactgtggccttgagagctttctccagttggccactgtgtttgtttgacgtgctcttatctttttcttttcttggcacttactctgcactgtgagatcctccagccttgttctgtgtgtcacctgcacccgcccagagtcagccatttctttaagaaccctggtgccttttatggggaaataggattagaaaccaagactgaagcatggagtgtgcttgtagcccctgtgctgtcacatcctctaggcctctcagtggacccagctaggaaacaggtatatgtattccaacccatgtatacacacaagtctctgttcctgtctgtatccatctgtatctatttaaaaataaccgtgagtttctacaagtatttctgagtctaatccagtaccatggggttcattctgttttcctcccttggttacttgtaatttatttctctgacagggagaaacctgactcgcattatccacagtttatttaggtgttcaatggtagcatttgtgtaaactacccttaggattgctgacgtgtatcctgcgagaaacaaatttaccaaccaaaatacaggctttacctatggctcatttttcctttatcctgcaataatcagtcaaatcactgtttcccaaggggtttggatcataattctgaaagaaatgctgtaaaatgctgtactttctgaagtctaaatcccaaaagatcaatctctaaatagaaagtgggaatgtttaatagggaatgctcatgttggtggctattgaatcatagaaacatttttaaaagagcagtgctatatagaaaataaatgtgtatgtattttctgaggagagccatgtcctataagaaaaaaagtagctgtgcatcctgatgcatgactttaaagtattagttaatgatggtgaaagccagcgactgtggactgtctccctgcagttacccataatctgtccttgaaatacgcttttatcatatgttgaattttctttttagttttctctgttttttctttttaaatttttttcattattattattattattattattattatttggaggcggaattttgctcttgtcgcccaggctggagtgcagccttagctcattgcaacctccacctcccgggttcaggcgattcttctgcctcagcctcctgagtagctgggactacaggggcatgccaccatgcctggctaattttttgtatttttagcagagacggggtttcaccatgttggccaggctggtctcgaactcctgacctcaggtgatccacccacctgggcctcccaaagtgctgggattacaggtgtgagccactgtgcccaggcttttccccattattttaagttgtccgcattcttttgttttacaatttgctgtgctatatatttccttttcccatcatttccaatactgggggtataaattttgtagagaccttgagagggctctgatttgttttatgtatttttttttcaaatttgactgcacaaaagagcattatcataacgttgactgtttacgcattgtgcatgtttgtaaaaacatggaaaattcctccataaataaagagatgtcttttttgcatatctgcatttgtgaaagataaaatttctcgaggtctcggccatttgggtggctgcatatacagtgatgatccagtgcagtttttgatcaatttcaacagaagactcaggttgtccgtcatggtatttcagatgaccacagttacaaagctgggtgcacacaattaccaaccacagcaatgtgcatgcatacattccccttgttgacctgttacctgtttctttctgaatacagtttgctcatagctcttattcttgtgtgactgtcattagtatacctgaatgtttatccttgcaaaaaatgtatgttattattgttcattttattgcacaaagtgacctatgaagtgttcggtcacgtttttatgtttgccaaataaatctctttttgtacatgtaaataaatgtcttttaaggaattaaaacattttcctcagaataatagttttggaataattttgatctttcaggattgtgatttgggggacttttagacttcagggattttgatcttttgggatttctgcatttggatgtggtgtttgggattgtgtcttttgggatgataaccggctcctggcaaccactgatctgtttctgacttttccgtttttgcctttctcagtaggcaatatcattaggatcatacggcacgtagccatctgggtgtttaacttagcagaaagcatttaagatctatttatgctgttgtgtgaatcaacagttcattccttttaacgctgagtagtgaagtatttcattgtctggaatgtatcacaatttgttgaactcttcatctgttgaagaatgttttggttgttgggatggttatgaattaagctgctatgagcatttgcctacatgtaattttttgggaacttacattttcaattcacttgagttagatacgtaggagtgggtcagataagtatgtgtgtaatttttatgtaaagatttgtaaatattttgtgaatctgtaacagaatgagtagcactttttccaggtgagcgtgtggattgccaagttgcatagagctttttaagttgactgatttttttctaatttcattgaaaaatccagtagttttttttttatcaagccccccctccttttttttttttttttttttgctcttgctgatgatctatttagttattaggtggcaactcatgtcaacaagtgaattcacatgccatttcatcttttcttgccttaacacggtgaaaccccatctctactaaaaatacaaaaacttagccaggcgtggtggtgggcacctgtagtcccagttactcggaaggctgaggcaggagaatggcctgaacccgggaggcggagcttgcagtgagccgagatcatgccactgcactccagcctgggcgacagagtgagactccatctcaaaaaaaaaaaaaataataataataggcctaatcattgtacaaggatgaaggtagggaaaaaaagaaataggaagaagcaaaggcagaaaacatctaggatgctggagcgcagagaacacaggaatgactcaggagttttgatacaagtttgattagagaaaatatgcaagtactgcagtgactaagtagcagattatagttatgaaatcatgcaggacaggaacgctgaggttaaatacaaactgacaacaaaaatcataagaataatatgtaaaagcaagtatgaagcctttgtatttgcttgcgacttgcagtttgaatagcaaaatgatctttcacatcaggctcagtgtgttaaatccagccttaggcaagaataagcaaatattgtttccatatgacaagcctttagctgctagtgaaatgctttctttgtagtgaactgtaggcacaaactatcagcagatgactgtgtatctgagcatatctttaaccacagttagctacaaattatttatagaggttaaataaatgtttacactgaatgattcaggaatgagcacataacagcggtttgggggattatatttctgctattgaaatctaaatactcctacaacaatcctttcagcttagatccgtggtttctagttgaggaagcagtacctcctatgggacattctgggtctcctatgggacgtactgggtgttctgtgggcatttttggtggtcctgatgatggcatttgtggagaggacagaaaacagactgcacctgctgcagcgcttggatagtcctgcaggatgaagggcggctctgcgccctcatagatctcctgcacgaccctctagatgtttacgtaggtaaaagcaaaaaacaacaacaaaaaactagtacttcatttttcttaaacatgcatggtatttttgtggtatttttaactttcaccgatacttgctgcaaatgcaattactgagtaaattgagggaaaattgtgctttggttggttgggtacttttagcgatagccattctccatttcagcaatgcccttgtggtgtttgagcggccagtgcaacacctgtgaatcagtcttcatttgtagctgtggcatgcaaatatttaacagaggggatgtaacattcactgtaatagacttaaaaccaaatatgttttaattagatgaagaccatgaagtgtgaagagaccactgacttttactaatagtttttaaaaaatcactgtcatttatgtagtttttgtttccgtagtatgacagtatgaatatgttataaaatcacacatttaaatgattgatttttgaggttgcctacaggtttttagtcttatgctgatgtgtgcacaagtctacaacataactgtgttctagcctcctggttctttccctcttaagcatcagagactggatcttttgcttggcacgtgataggaattcaagataggagagtaattttctgggatcctttttcagtaccctatcctgtgtcaacataggacattattttgacacttcacttaaaaataagcctccttattcctgagaaagccataaatttctttttctttaataatgagtaatttgtcttggataaactgtctttaataaatttttttgtcttgtcatttacaaataagcatagtcttattttttctaatcttagtacttttgattgtttaatatttcagtttttaaaatcaaggcataacttacatgtagcaaaatacagaagtcttaagcatacaactcgatcatttttttcaacattttattataaacattttcatacgtacagaaaagccaaaagaattgtaaagtgaacatccatatactcaccacctagattctgcaacgaacattttgctatatttacttcatcgcatctatacatcttcatgtccctccattcttccaccagtccatcttatttgatacatttcaaagctgcaggcatcagtacacgttgcccctaaacacttcaccatgcatatcattagagtttcatgtgtttacttgttaagctaaaatttgcacacaataaaatggataaatattaaacataaaatattgaacataaaacacatatttttattattcctttcacatgagattcatagatgccagaataacagttacctttttaggggtggtggtaagaatgcaaatattttatatctctatctaggtggtgttttcatgagtgtatagtttaaaattcattcatgacatattcatacattagaatagtatttactgataataagcaacaaactaacatataaatgctcctcacatgattttacgaatgtatgcatccgtgtcctataagtccattaaggtatgaaatatcactgccactgttacctcagacagttctctcatgccccttcccagtcaaacctaaccctaacccaaaaggaaaccacaattttgaaaatttttgccatagaaaatacagccttggtatggggatttgtggatggtctggaaacccttcaggggaccctgggggtcaaagctatgagtagtattgttataatactcgtatttttataattctactttggcattttcccttttctatctcattctgttgtgaatggggattttcagatgctacagtaatttcttgcattgtaatatttttgctcctaggttctgtatttaagggagattgatgagctgaggaaagaatgaatgctttaaaacttgatctaaggcggtattctccatcctactggacaaaataccccccttttttacaacaaatatttaatcatggccctattattctcctgcgatgcaattcatagattaaaataaccatcctaggccgggcacagtgactcatgcctgtaatcccaacactttgggaggccgaggcgggtggatcacctgagctcaggagttcgagaccagcctgaccaacatggtgaaatcccgcctctactaataatacaaaaattagctgggcatggtggcccttgtaatcccagctaattgggaggctgaggcaagagaattgctggaatccgagaagcagaggttgcagcgagcagggattgcgccaccgcactctagcctgggcgacagagtgagactctgtctcaaaaaataaaaaaatctaaaaaaaaataatcatcctaaacatacaatttaaaaaaaatcaatataatattctagctttgatataaaggagacataaaagtaattcataatgaatatgtattttaatatgtaaattgaattcagaaacagataggaaaatccagctgtcttttattaagctaaacattaaaggcatttttaaaaataaaaagtgccatacttttactttgttttggaaagtattatttttcataaaacatgttatatagtctaatatgtaaggtttattgtcatttttaatgaattatgaatctcaagtatctcagtataaaatgtaatatggtaagtgtacatatataacaacataaaacaaaactttttggttttcttttaataattatagtttttaaactgtataaggatactgagagcaaaaaatttgagaatcactggtttagcttgtactagaacaatataagtgaattatatagtgtgtggctttaaaaaaaaatctagtgcttattttactcaggataatgtttctgagatgcatccatatattagtagtttgttccttattatcaataaacagtattccattgtatgaatataccaccaatgaattttaaaatatatgcccatgaaaataccatccagatagggaaatacagtatttgcatccttaccaccttgcccctaaaggtgactgttattctccatctaagaatctcacatgcaaggaaacagagtttgttcttttatgtctgacttccttggctcaacgttatgcttgtaagattcacctgcgctgtggtgaatggtttgttttctttccttttaacgctagttctcgttgtagtgtccacctgtatctgtgctcttttgttctcctgtattttcacatggaatagcttttaatcttctactatttctacatccagacatactcattatacgaaggtggaagtatctaacaacttcattatgctttcagtgtagtcagccatcagaatttacatattgaaatgcaaagtcattatgaattgccttctttggtttctcctttacatcactgttagggcattatattgattttttttaaaaattctatgtaaaaggctggctgttttatctggattctatttcaggggattaaaggaggcattattaaatattagctgttaaaaagcaagggaatattgagtccagcaggattcagactacctccttagatcatgttttagagtatttattcccttctgatgtcaccatcctccatgagatacagaacctaggagcaataacattgtaatacaaagaattgatcacttgcttcacaagaacatgcttttaataagtgtatcatttattttacaaatggcgttttcccaagagatgacatttctggccggttgaccaaaatttttggtgatgagtagaaacttcatgtttgaggattgacatcttgaattttttgtgcaaaatttgaatattaatttatagaggacattattcttatctccacagtatctcatttgcattagttaatattaaataagtaaagtagttgtccatttttctcagtcttaacactttctaaattcatgcctcaagaagttcttttattccaagaaaatgatccaaacgttattaattgcaaagtgtactcacttatttttcacttcggggaaaaaagcagaatgataactaaaaatgaggtctctgaagttagactaccttgatttttaatccagctcccctacaccagtcacttccttgtatgcctcagttttcttatctagcaaatggggtaattgtacctacttaatactactaagtgtacctggttaatatggtttttgtagttattagagggaataatataacgtgagatacttagagcagtacttttagtaaggatttagtaaataagctttagtaaggacatgcaagatctgtaaagaatagcttttggttattatgggctattatgacttcagaaataataaatataaagctaatattaatactagctgttacaactttagaaataggaacaaatgatgagattagggcttgttcctttgaattttttggaattagttttcttagcagtcaacaagtatatatggactattagatgtggatactttggaattaaagatataaatgagtaattaatactccttagagtgagctcatggcattgtcactttaacaatatgcccaaaagtggttctatttaaattccacacaagagaagtagcaatgttatatagagcattgggttttcgtagctatttggatttggaaattaggagcatattagtaatcttagtaggacaagccagaggaatgaagagctaggaaggaagtagggattgtgtatccagctgggagaagtttgaatgagcatggaatagaatgggcatcttggaggagatccttctctaaggcatctagaggagaaggcagtgaacttcacacactggagggctgactcctggaggtgactatggagggaggggtgggccctcaggtagagtcagaagaccactcgtggctgcagagggacacttggactctgggactgcctttggtgagttgacccagggactaaggggagaaagtttgaaattgtgtctaaggggattgagcaaagcagcctgggaatgtgtaaaaaagaacacacaaataaacaaaaaagtgccgagtggtcctgaaagcccacgggatgagacagtttacagtgtgagaacatggtaaggcttttaaaaaaattgttttttctctttcatatttttcttgtaattgcttattttaacacaaaatgaaattcatgatagctaacacttacataggcttactctatgccaggcactgatctggtgtaaatactttacatgtgccagctcattccattctcccactaattttcagagctaggtaatatccttctcatcactttacagatgaagaaacagaagcactgagacatgaggtaatgtagttaggaggggaaaatagaatctgaacccaggctgtctgaatcccaagtctgtgttcttaattatctaatgatggtattttgcctcaaaaaacaaacaaacaaaaaacaacttaggaatcatttggaaggaaacaaaaaaaatagcacaacaaagtattatgcaggtcattgattatcataaaatgactgtctcccaaagcaaggagagatgattattgaacacttactttgagccagttactatcttaagccatttactttaccatccccattttaatcctcataactctaatacgtaggtgctgttactttcatccctgttcacacatgtggaaagcagcagggcattaatctttctaaggccacacagccaataagaggcaaaagcatggcacaatcccaggctcttgattgtcttagggatggtcattaacgtgccatttattattctggttggtagtttagcaaccagctttctaattgcatttactattctctttaaagcagcgttgaatataatagactgcaaccatacttctcctctaccacctaagttgcaacagaaaaactgttgctttgaaggatgtgcaagagcatagacatggcccgcataaagcagagtgtgaaggtccccaaaactcaaggacagtattgtcatggataaatacagccgattgagcatgctgatgaaatgttgcattatcatcttgaaccttaaactttaaggaaaataaataaaaatcagtaacttcaaagagcatttcattaaatagacaagtctttattattaagccctcagcatttctcagctcagcagcagttcctgagactgtgtctgataatctgaatggatagtgcaggcatgtgctttacatttggaatgtcttagaattgcttcttggaagctccagtgccaccagctgactggaataaattacacgcctagtctcacatattgtcagaagttttcacgtgtgcatcgggtacagcctaaaggtttggcacagagctgtaggtacacgtttatgctcaacactgagaaattgaccagaaatagtcaccaatgcttcacactttctgaaactcccacgtgtattcctctgaagtccctttctcattctaccctctccatgacccaaattgtcattttccattcagttttccttccccactcctttagatcctgtttggtagacttgccgtaggaacacagaacaaaatgaaacattttcttatgaatattcgtaaatttctgatggtcttgccctgttaagaccaaaatctataggtgtgccgggtgacatctgtaaaatggttgtaattatgccacgttctcttggtgccctaaaacctttgttgaattttttacagtagagctttttaaataagactttttatttggaaacaattattgaattgcatgcacttttaagaagtaatacagagagatcccatggacccctttacctagtttcccacaatggtgattgtctttgtccatttcctgttgcttagaatacctgaagctgggtaatgtatgaagaaaaagaatgtatttcttaacagctgtggaggctgaaaggtccaagatcaagggtctgcatttggttagagcccttttgttggtggggactctcttcagagtcctgaggtgtagtacagggcagtatatagtgagggggactgagcctggaacctcaggtctctcttcttacaaagccacaagtcccactcctatgataaccctttaatccatccactcattaatatattaatccatggatagattaatccactcatgaggtcagagtccttatgatccaattgcccctaagctcccatctctcaatactatcacattgggtattaattaaatttcaatatgactttcggagggggcacatattcaagccatagcggtgacatcttgcagaattgcactggaatatcaggaccaggatatggacattgataaaatctaccatgtcagtgggactcctgttcaactcagatgagggatgagcctgcctggactgccttctatggtaggttaggggttaggagttaccaggcctggcttactttctgctgttggtgagggaaggaaggtaacgttctttgttgcgatcttcctccagtcctggggtccctagccagttttcctgcttgttcacaataggtactaattgatgctcagctgaaagtcaaacactcagattttctcagtgttatttgtacttattgtctgtgtgtgtgtgtgtgtgtgtgtgtgtgtgtgtatttacggctatgtaattttaccacatgtgtaagttcacatatccctactacagtctccattcatggagaataggttactggttatgaggagtgagggagatgagacagggccgaaagtggtgaatgtatttataaaagggcaacagaagggatccttgcggtgatggaactgttctgtatctggactgtatccgtttctataattatgtcatttcaagaatattctctaaatggagtcatacaatatgtaaccatttgagattatttttccctctcagtgtaattcccttaaagtccatacaaatggctatacgtattaataactcattcatttgtattgctaagtaatgggtcatggtatggatgtaccacagtttgtttcgccattcacctattgaaggacacctgggatatttacagttttgggcttctgtgaacattcatgcacaggtttttacataaacataagttttcatttatctgagataaaaatctcagagtatagttgctgcgttgtgtggtagctatatgtttagtttcctaagaaattgtaaaattgctttccagagtgcctgtagcattttacattctcaccagcaacgtctgagtggagtagagaggcttcccagcctgggcacttgttgtggagagattcccccttgctgtggctgcccagctgccttgtgtgtgttggtgagaaaggagtctcatgtctagtggggaaggaacatccttctgtctcctgattctcagtgggctgccagttggttgatcccttgcctgtgctgccaggcttaccttctgttgtcagtgggactcctgttcagctcaggtaagggatgagcctgcctggactgccttctatgataggttaggggttaggagttacgaggcctggcttagtttcttctgttggtgagggaaggaaggtaacattctttgttgccatcttcctccagtcctggggtccctagccagttttcctgcttattcacaataggcaggtattgttgctcatgagcctctgaattggctgggtgttttttctggtcttggctttgtttgtcccttgcactaattgatgctcagctgaaagtcaaataggtggctctgctgatctggactgagctgcctcacatgtttggagatcaactggctatgggctcatctagcatggcctcagcttgcacagtcatgctcttctctctgtggtctctgattcttcagcaagcccacctgggcttgtgcacatgatggttgcagggatccaggatagtgtggaagtgcacaagccctcttggaattggagcttggagttggcaagccatcacctcacttgcgtcgagtgaaccaaagcaagtcacaggatcagcccagagtcaagaggagaggaaaggacgtgcttcctgaaggcaggaatttcacattcatattgcaaagagcagaggtacaggggagcataaagaatcgaggccgtttttataataaacttaactcaccctcattgttgtgcatatgtatgactgagttcatctcttggggttctgaatacctttaacctgtctgtactttggttacagggactgacatctgagtcatttctctttgattcataggatggatttaatttttgaagccatccatcatggaaagaatatgctttgtcttctcagaaattgttatttttttccagattatttcttgacatgtttctgcatttttcaaatgtccttttaaaagtatgtagctttgttttccaatttttttttactgtggtaaaatacagataatcaaaaatttactgtcttaaccatatttgaatgtatacttcactgccattgagtacgttcatattgttgtacaaccatcaccccccatccatctccagaactcttttcatcttgcagaactgaaatgctaatccattaaacaataactcctaattcccttcttccttgagcccttggctggcacccttctactttttgtcttatgagtttgtctactccgtgtacttcatataaatgggatcatacagtatttctcattttgtgactggcttctttcacctaatgtaatgtcctcaaaatttgtttgtactgaagcctgtgtcagactttccttcctttttatggctgactgataaagagggacctgcttccgtcatgttgctattctttttcctatatgtcttatcacttttttggttttccatttcctgcatttgtctgcttttgtgtttagttgattttgtgtagtgacatgtttgaatttttttcttttttttttatattctacgtctgtttttcttgtagttactatgcagatgacatttggtatcctaaagtcaaatactcttaatttggatttatatcagctgaacttcaatattatacaaagtgctgctcttttatatcttcattcccactgttttcagttgttgatgtcacaaaatcacatacacgatacttccaaaaacatcaataatttttaaaaatgcattagccttttaaataacatagaaatcaaaatgtggggttaaaaaccaaagttacaatgatactagcttttagactaataattgcttttaaaaaaagtattagcatcttaaatcatatagaaaaaagtggagttacaaactagtgctaaaataatactagcttttacaattgcttatgtatttacctttactgaaatctttatttcttcatacagctccaagttactatccagtatcttttcatttcattcagaagggctccttttagcattttttgcagagcagtctacaggtaacaaactccctcaacttttgtttatctgggaaatcttaattccaccctcacatctgaagtcccattttcctagctgtaggattcttggttacagggttttgtttttgttttttcaaattttctgataacaaatctgctgataattttattgaggatcccatgtatcgtgatgaatcactgcagtttcactgatttcaagattctgtctttgtatttggctgtgggaagtttaattacaacgtgtctcaatgtggatatcttaaagttcttcctacttagagattgttaaacttcttagatgtttgtattcacatctttcctcaaatttgggaagttttcagcccttatttcttcaagtatactttctgttctttctccctctcttctttttctaggactcccataacacatatgtttgtcctctttattgtgtccctcaagtcccttttgctctgttcacttttcttcaatcttttttctttctattcctgagaatattttcctttgccctatcttcacattcactgattctttcttccacctcattaaaattgcttttgaatccctctagtaaatttatcacttcagtttttttttctgctccagaatttctttttggtttcttttttggttttctgtctttatttatatttccattttgttcaaacgttgttttcttggctttctccacatctgcctttatttctttgagcatcttcaagacagttgttttaaagtctctgtccagtatattagccatcagggctttttcagggacagttactgttgttttattttttttctttaaatgagtgatactttcttatttctttgtatgccttgtgattttttgttgttgttggaaagtggacttttgaatctaatgaggtaatatggaaatcagatttcccccttacccaaagtttgctgtttttgttttttgttttgctggttgttgtaggctgtttctgtgccatggatcagcctaaggtgtatacttaagttcttctcaggtcttttctgagcctctgccttttgctgggcatgcacaggcacttcctaattttcctcatatatgcagttgcttttgaatatcctaatcttcaatgtctgcttcctaaaagaagagaaagagaaaaattaggggataaaagaatactggcctttggccaggcacggtggctcatgcctgtaatcccagcactttgggaggccaaggtgggtggatcacgaggtcaggagatcgagatcatcctggctaacatggtgaaaccctgtctctactaaaaatacaaaaaaattagccaggcatggtggcgggtgcctgtagtcctagttacttgggaggctgaggcaggagaatggcgtgaacccaggaggcggaggttgcagtgagccaagatagcgccactgcactccagcctgggcgacagagcgagactccatctcaaaaaaaaaaaaaaaaaaagaatactggccttttaaatctcatggaagtcactttaggtggttggtagaggcctacaacagtgggggaaggtgcagcaacagcggccactggcctctttgtctgcacctctgtgatcaaaagcagcaatcagtgataagaacagatgtcttgtgtttggaggacagtgtcctttttgcctaccaaggctcctgcaaaccgtatgccaagctgctccaggaacatgtgcacagctgcctgccatgggactggggcatgggataggtagctctattatgccaagagctgaaattaactgaaaataacttcaatttactgtccaagccttcttctggaagttggaagccttaagtagcctccagagttccaaaatagttatactggacagattctgccagtgcaattgttgtccaggtgagaatacagactcctggttctctctcctctgccatcttcccagaatcatcctctgtatcatttttataatctgaaaaaaatagttgtggaatttggaggtatttttctaggttttatgatcttctcctgaatgttactctttgtccagccttataaatttttggtattattatccagacaaccatgatcctacaagtctgacaaaccatgctgtgactacttctaattgggactgttaaattatcacactcatgcattcctgtgagggaagccttttgcttctatggtgggtcctctgtggaaggtgcgtctgccggggacctgtgaaggctgggcagtgccccagggaactgtgaaggctggacagtgctcggcgctgatcgatggcagggtcagctttttgagagccctgtttgtgttgtcccactcctgttcctggagaaaatcacctttacaaaggctcaactggcaattttggaattacttgggtcattgttctgaatgtgctattggttttcagtaaataaagttcaaattagaagcttagaaatagtttaaggtgtttggtttttgagctcctaatagtctttcttcactattttggccctcttggtttctattaagttggaccatatgtaattgtcattttgtaagtcaaaagcaatggaatagtggcaactgcctatggttcaacctaatactttacattttacctgtagcagattgtggctttgttttgttgccttctcaactttcaaagaaagcctttttttttattttatttttttttttctatttgaaggctgtttcccagaccagatgtatctccagctctgacacatatgtgcttgactggtcattcacactgatgtttctaaatcagcctttcataacatttttatttattagtacctctttttttttcttttttttttttgagacagagtcttgctctgtcgcccaggccggactgcggactgcagtggcgtaatctcggctcactccaagctctgcttcccgggttcacgccattctcctgcctcagcctcccgagtagctgggactacaggcgcccgccaccgcacccggctaattttttgtatttttagtagagacggggtttcaccttgttagccaggatggtctcgatctcctgacctcatgatccacccgcctcggcctcccaaagtgctgggattacaggcgtgagccaccgcgcccggcctagtacctctttaaatgaaaaaattatttgataaagtcttgactgtctttcccacagttgtttgtgaccagtatttgcactgattctcgaaacgagtgaatcttccaccagtccctaactgtgatcctaatcacgtgtaacgtatttcccaccctgcattgtccacaggattcttcattcatcacctaccacgcatcaaagtgccagacactggagtcagaaatatgatagcaactcatgtatgctgtgtgatcagtaactatctgttgaatgaatacatgactgagtgtaagttaatgaacgaatgagtagcatttgctttggaggagctgtctgtcttcagaagagagaaacttgtaagcagacattgtcaatttggtgtgcaaaggacaatcatagatgtgtatgcaaagggccatgggaacactgcagagatgttagtttttcatatgcactgtacccacattctgtttcccagttgcacggtgaaaatctattctgtcagatttgtgttttgatcacttaaggcttctgttactatcacctgaacaaattatgcagatttctcaatcacatttgacatttctggttcaatattatgaacccgatcagatcccattgttgtgtaacattttctggatatatgtcttcgtcacctatctcacaggtttgttgtgaggcgtaaatgaagatagtatgtgaatatgtataaaccactatgcagaaaacatggaggttaagctgtcactctggatgatagttgttcatcactgcctacagtaactgacctataaaacaaccactaggaaaaagaaaagaagatattttgctttttttttttttctggaagaaatacagtagatactcaaattgcctgccaatagaatagtttcctggacaaggatgaatctagaaaggacatttaacagagattgaccttggttttgttacagtgacctgagaatgtcagtcagtagtcttgcataaccaccatatagtgaaacttctcaaaatctccatggtaacatgcagagaactgtatcatagagcacggtgtatacccacacggactgtgatccaggaagaaagatctgtttccacccccacacacacttgctcacgttcacctctcttctgccccagcgcctcagatacctgcttcctcactggtaattgtgatgatatttttctctaaaatctattttgtaactcattctttctgattttactctcaacccccttggcgcttacattggatgagataaaagtgtcactgtagggctgtaaactttgttgtgatgaagactcttgagacgtaaaatgtatgctctaactgcagacctgtgcagaacgcgagtttgatcttcaagtgactttcgttccagccttgatattcagatgcagtgcactaatttgcccttattggcatcctgtttaatagatattcctaagcctttttccaaatagttgcatgtttgaggaagactttatggctatcaaagtgtttactcatataatccagtttgatcctcaccttgtgagatcgtcagggccggtaggatggttgtcattttacagatgaggagacattttctgatgggaattagccaacctgtggctgagctggaaccagaacccaggcctgtgtccttgtactcaggttgccacagcattcctcctgatgtgcccagcagcaggcttctaaaggacctgagccccctctgccaacagtgtcccctcttagctactggtgtgatatgtagctgtgagtccagggtgggtattcacatattttcgattgaccaccagcttaaaacttcccatgccacaccacactgcccatctatatattactttgcaatcattatcataagcttaaaacttcccatgccacaccacactgcacatgtatatattactttgcaatcattatcataagcttagagactttacagaaagtcgtccttaaagtgttgctaaaaaatataggtcaattacaaaaggagacatggtccttttcttttttcttctcccctaattataaacaataaaagccacagcttcatgctgagaaaggatcagcagggaatgatggacattgtgatttggcagctgacattttctaacatgattttgttttacataagtagtttgaagtttttgttggttattgtcttgccttcctttctgacaaagtaacattttttttgcccataaaaatcaagtagagcaatgcatttcccatgccgtcgtgtctcccatcttgtagcaaccagtagtgtataaaatgaaagtcttcccacctttaagcaaatgtttgttttccttattaagaaagaagtttcatttgaagctggaggtttttttttcctaacttatattagtccatattttaatagtagtttcctaaagaaaatatctcagcatgaaaaagcaaggtgatactatattttagaaaatgccctcatggcttagattttaaaactaatgcttttgttaagtgttttggctttgaacaaaaagcctccttgagaaacgctatttcccattgcacggtttcttaactctctgggttaaagttcgtattttctatctttttacatctggcaaatagacccagagaatgtttttgtttcatctaacagttatttctacagatctgaccaggctgcctgcacacatctatatttttacactgacagcataagtgtatgttttgtatttcattgtagcgaaagcacttcacgtatgcttatagtaggttgaagtatttttagatcaaacgtgaatccaccatgttccgtaaactaaaatatatttaatcttaacagagtatacttggcggaatggctgactttaaacataagcttaaacaaaatgatgagttcataattatttaatgtaaactgaataaggttgaagggccctgcagggtcgatttcaaagtgcttcaatgattacaaattatagaccgcctttccagtaaaacactactcaggtgggagactagctggcagcactataaagtacctaaatggtttcagactaaagaatctgttagttttgtaggtttaacatccttgacacttaataggatttgagattccattgtagcagcagcttttattgcatgacactttaattgaatgccttagagtaaaatgaaattaacaaaggcagtattaaattatggatgttccttttttatcatttggctaagaattctgcggagtttcttttctgattatattattttaaattgattgatgtgaaaaaataaacacactatctttaggactaggtataccatctggtccaagaaattgtgaataaaatgaatacagagctggagttggccaacttgtctctcctacgcttcagaaagcaattacgttagggctagagtagtttaaaaatggcctgcaataaatccccattcttgagtggataagagcaaggcagctccgtcttttgcattgtagctaccagaatgacaacgtattctgagacagatgggagacatcgaacagtagttgatttttgtttgtgaagtggtgtggcaaagccagtaacctattttttttaaaaaaaaaaaacaaggacaaatttaaccaaatctgacctgtttatatttaaacatcggtgattggaaaaccgttttcatatttggatattgacgatctttatattgcttctccttttctctaatactatttaaaataagaatctgcaactaaactaaaatattcaaaaaataataaagttaagatgatgagtccgggcgcggtggctcacgcctgtaatcccagcactttgggaggccgaggcgggtggatcatgaggtcaggagatcgagaccatcctggctaacaaggtgaaaccccgtctctactggaaatacaaaaaattagccgggcgcggtggcgggcgcctgtagtcccagctactcgggaggctgaggcaggagaatggcgtgaacccgggaagcggagcttgcagtgagccgagattgcaccactgcagtccgcagtccggcctgggcgacagagggagactccgtctcaaaaaaaaaaaaaaaaaaaaaaagatgatgagcatgatgtcagcaagatagtggaatcagaagcctcagtctctactcccctgacccccacacaccaaaaggtgaacttgcagctgtccacagactagaatatctttttgaaaatgtcaacacttggaaacgagcctgagatacctgtgtgatctgcataattcaatgaaatctgaattaggagagtgagaagaatggtctcactctgaccacactgccccttcccatctcccaagttggcacagtgccagactgagaggatttccctggaccaacagtttctgccacagggaaagagaaccagaggcagtcatctagtgatgctaacgttccaggatgcttcacaagaagcccactctggtctcacctcttaggaaacactaggagaaacagcatggccacagtgcctagggtcaggtagaaacaaagaaaggaggcagaggtcatggttaccagcacatggatcttagaggtacctctgtgtttctggcagctgtggctcccaatagcagataccagtcaacttcataacccacatttaaagctaagctggttgccttcattaacgtggtaggaatttctacctagcctgagttcctagaatgctattctccctggctagcttcagagcccacccaacaagcctgcacaggcaggaagacattcacctcctcccatttcagggaagcaaaggggctagatcagcttgacccagaaagtcgagctgtggctccacctagctagaaagcccacccaaccaccctgtgcaggcagagactcccacctcctggcattttggataaatgcaggggctagtcttgcttgatctagaaagtcaagcagcagcactactcagccaaaaagcctgcccaatgaccccaccctagccaggagactcccagctccacagatttcagagaaatgaaggggttagatcagctttacctaggaaggcaagcagtagttccactcagcccaaaagcccacccagtgacccgacgtaagcagggagactcccaccttcatggatttcagaaaagcatagaggctagacctgcctgaccaggaggtcaaacagtcactcaactcagtcaaaagcccacctcatagctccaccctgacagggaggaaatcctgaatcatgaatttcctaaggaacatagcctctggtctgcttgtcccaagcaatgactttgctaacctcagagaacagcctatagccctgcccaactgtagatctcaatagtggccaaggaatacatcctgtaactggcctgaccagaagtcattgcagtacttagccagcaatctcatcaaacagggaagccaggcccacaaccccacctgacatcagagcaaaagcagcagcccaactaagttgtgaactctcatgaagctctgcctgcccaggattatcaccagatggcccttccagaatcacagtctagattagatagtggaaatctattcctgtcaaagaacacctgtaaaggccagaaaaggggactgtcttctcaaatgtgcagataacacaaggattacaatgactcaagggaatcatgacacctgcaaagaaaactaataaagcttcaatagtagaccccaaagaaatggagatctgtaaaactgttgacaaagaattcagaatagtactcataaagaagttcagtgaactacaagaatctatggatagaaaattgaataaaatttggaaaacagtacacaaagaaagcaagaaatttgaccaaaaatagaaacaataaaaaaaaacaaatcttagagatgaaaaatacagtggctgagttgaaaaattcaatagaaagcttcagcagaagacactgtcgagcagaagaaagaattagtgatctggaagacagaacatttgaaataatccagaagagcaaaaagataaaagaatgataaagaatgaagaaagcctatgagagttatgaacactgtcaagagatgacacctttgtataatgtgaattaaggacagcagagagaaaaaagcaccagaaactatatttaaagaaataatagctgaaaacttttctaatataggaacagatgccaatacccatgttttaggctgttgttgcattgctgtaaaggaatacccaagactgggtaatttatgaggaaaagatgtttcatgggctcatggttctgcagacagtacaggaagcatggtgccagcatgtgcttctggtgagggcctcaggaagcttacaatcctggcagaaggcaaaggggaagcacttgtctcacatcgctagagcaggaacaagaggtgatgggaaaaggtctccaactccttctaacaaccagatcttgtgtgaactcattaccatggggagagcagcaagccactcatgagggatctgtccccatgacccacacacctcccatcaggcctcacctccaagaacgtggatcacagtttaccgtgagattgagaggataaatgtgaaatcatatcaacccaagtacaggaagcagagttctccaatcaaattcaacccatagaagagtttaccaaggcacatagtaatacaattatcaaaaatcaaagacaaaaattccgagagcagcaagagataagaaacacttcgtatacaaaggagtaccaatactaccatcagtggatttctcagcagaagccatgcagacactgaaagaacaagatggtatattcaaagtgctgaatttatatttatattttacaataaagtgttgaatatgtaacgcaagggtatcatactgcatattagtagttgagaaaaatattaaaattcaaaatttgaatttaatatgtattgcttttgcattattgtaaagttgaaaaattctaagttgaacttttataagtcaggaattgtctgtacttccaaaaatctttttacaaagccaacattaccttggtaccaaagccaaacaagaacattataagaaagagagttaaaggtcagtgttcttgatgaacatagatgcagatttctcaacaaaatactaacaaactgaattcaacaacacattaaagggatcattcatcatgatcaagtgggatttattcttcgatacaaggatggttcaccatacacaaatcaataaatgtgatatatcacattaatggaatgaaggacaaaagccatgtgctcattttgttagatgccgaaaaagcatttgacaaaaattcatctttttataaaaattctcggcaaattagttgtagaaggagtggacttcaacacaacaaaggccgtgtgagagaatcccacaattaaaattatactcagtggtgaaaaattgaaagcctttcctctgacatagacaaacatgcctattcttgccacttatatttaacatagcattggaagtcctcaccagagtagttaggcaagaaaaataaatagaaggcatcgtaataggaaaggaagagctgaagttgtcactgtttgctgataacatgatcttatatatatagaaaatgctacagaccccaccaaaaaaaaaaaaccctgttggaactaataaacgaatatattacagttgcaggatacaaaatcaacacacaaaaatcagtggcatttctatatgcaaacaatgaactatctaaaaggttatcaagggaacaatttcatttacaacagctacgaaaattacttaggaataagttcaaacaaaggagtgaagacctttacactgaaaactagaaaatgttgataaaaaagttgaagatacaaataaatggaaaaatattttatgttgatggattggaagaattaatattgttaaatggccatactaccaaaaccaaccctaccaattcagtgcagttcttatcaaaactacatcatttttcataggaatagaagaaacaattctaaaatttatgtagaaacaaaaatacccccaaatagccaaggcaatcatgagcaaaagaataaagctgaaggcatcacactacctggtttcaaactatactacagagctatagtaattaaaacagcatgggactggctgaaacagatcaacagatgaaacagactagagaccccagaaatgaacccatgcatatgatttaaatttattttctttttcttttttcttttctttgttttttttttttggttagagaaagggtctccctatattgcccaggctagtctcaaactcctggcctgaaatgactcatccctgagcctgtcaaagtgttggtattacaggcatgacccccatgcctggcctattcaactgattttcaacaaagatattatgccaagaatatgcaataagaaaaggatatccccttcaataaatgactttgggaaaagtagatatccatacacaaaagaatgaagttagattcttacttcacaccatatattaatataaaaatcaactcaaaatggattaaagtcttaaatataagatgagaaactataaaactaatctacagagtaagaaaaaatatttagaaaccatactttggataaggggttaatatccaaaatatataagaagctcaaacaactcaatagaaagaatacaaaaaattctaattaaaaaaatggacaagggactggaatagacatttctcaaaagaagacatacaaatggctgacagatacatgaagaaatggtcacatcagaaatcactaaggaaatgcaaattgaaatcacaatgagaaactacatctcacacctgtcagaatagctgttttcaaaaagacaatataacatgtgttggccaggatgtgaaggaaagggaaccctgttggtggaaatgtaaattagtgcagccattgtggaaaactatgtggagattcctcaaaaaaaatgagaaatagaactgccatatgatctggcaatcccacctctgggcatttaccgaaaagatttgaaatcagtgtgttgaagacgtgtgcacaccaatgtttactgcagcattattcacagtagctgagctgtggaatcagcctaagagtccatcagcagataactgggtaaagaaaacgtggtacttacacgtaatggaatactattcatccttaaaaatgaaggaaatgctttcatttgcagcagcatggatggaatcagagagcgttatcctcagtgaaagaagccaggcacagaaagacaaatatcacacaatctcactcatctgtgaatctgaaacaataactcatagcagcagagagtaaaataatggttatcgaggctggagggtggggggaatagggaggtgatggtccaagagttaaaagatctcaggcaagaggaattttttttttagttttgttgctgagcatggtgaatatagttaataatagagaattgtacacttcaaagtgtctgagagtaaattttaaaagttctcaccataagaatcattaaatatgtgagctgatggatatgttaacgagattgatttaattattccacattttattaatcaatcataacattactttgtaccccatacatttatgcaattgtgaattgtcaatttacaattaaaaagtattttcaaagattttaaaaagtggaggctggactgcttaggacatgtgaaaacagaagacaaaatataagaaaacattacaaattaaataattattttcttaacagactattggtgtaaatgctttataagtaactgtctactggatggaaagggggaagaaatttgaacatatctggtaaattacttagtaaatttaggcatttatttaaaaaaaaatacacttgctcatgattataagacttctgagctcagattgtgagtgtgaggaaagaggagacagcctcttaaaaaggtcccaagcatgacagatgcagatcttggttgagagttgttgcttctgctgtcagtcacatcatcatcctgttaaatgtgaatttatcttttttcccctatgcaaaatagtgagagaaatattccttgaggaaatgtggtctttatttcaaattaacagttttagcgattgcttgcttttattaggtcatgcatcttgttttctggatttgtcatataatgcagttgtgctcgtgtaggtaacacaaatgtggtctctttgaacatagaagctgggattgcagtgaaatagagagagcgaaagtgctctccttaagtcctccttgtttgttctctttcttttgggttctgtctgttaatttatctcttttactctttcccttcttccttccatccttgtcaaaagcatttatgtactggacagaagcatgtcttggatgacttaaagtgcagccctgttttgtagttattatcttcctgcataataagtaatctctgttttccacttgttgcagagttaaacacagctttctagtgaatcctcaccctagagtagaggaatacgtgatattaattgaaatagacttcctacagggcattttgtagcttttctcctctttctcacttaaaaaacataccagatagttttgtgttcaggaccttaaatcctagcctagcaacggtcatacattgtgaaacaaataatgagagagaaggttatagttaatactcttataagcctctccatgtacaagaatacagacaaaaatgcaaagaacagcactggatgtcttctgattaatcaaattatttctgtgtctcagtgaatggactgaaatacagtacagcctatttgccttaataccgatgaatttttatacagtgagtacgttctctggtctttttctcgctgatgaaatggatgtttgtgttagggctagagggagaaaagaggcgtgatttaactgttacctgtgcctgtgctttacagttttcctttttaaaacaagttttgaggaatacacctcggtagtactactgtacagctggcaccctacaactccctttggctcctgcagctcccccacacccccaccaacacactaatccatataaaagtcatattactggagctccacctcatctttttcagatatcaaagcaaatagaagaaatagagtataaacattgttctcttactctgacaagcagaattgatagacatctttccccatacactttagtggtggttgacataaacattgtttttgttttcaggttggaaataggaaatgagacttgacaatatattcgtgtcactaaaattctttattccagaaaagacttagtattgaaatcacacacacacacacacacacacacacacacacacacacactcccatacagaaaacttttctcagtggactattgccgttagtctttctcctttttcccacctaattacctgacattgtttgaaagataattataattgacaaaattattttttctatacataagcatctaaactctgattaactcaggaaaacacaaagaaaatagttacttcatttgcagaaaagcaaaggtgacagagcgtagcaacatgatgcagctgatcacactggagccttgtgcacacgctgtgttcctcccatttgagcttaccctagagatgaacctgtgtaaaaagaggtaaataccaacaggaactgagagcaattctagaaaaactaatggcattggttaaaaaaaaaatcccttctcctcaatttctgtgtctaagtgattcctaaagtaccattttataaatacgaagtatcattcctctggaagaccattcctttttgtttttttcagctggcccgagccctacctgtcctttccttataaaatactggccaggtcatcagaaaacagttaactcagagatgctctctaaaaaactctctgaagttgacctgcatggcagaagtgtagcaagtcaactctctctgctgtccctcacctgttctgtagctttgtgaagtcctgcatgaaagcatttcaacataagacgtggtttcattggggcccttctacctcaggaccgctggagtttgtatggctgtcagtgtcacatgcggttgcacagaagccactctcagaagtctgaagagaaaggaactgaataggagagttagtttcttagagagcccgtgggaggaccggagggcaggctcttggaagtgactctgagaatcatgccaaacagctcgtgtgctccggggagtggacagtctcaaagctgcagccccacctcccggcccgggacctcactccttctgcttcgattgaagcaggaagccactctgcactcactggctctgggagagagtgctcgggcaccagcttcttcagcagtgtccccgcctctcaacagtcatgggtggctactgctgccggacaccagacaccttcatacgcacgcttgtcagaacagcagaaacctggtctcaccttgtgtctccctccatcgcccataacagggtgtgcggtcagtgtgtgaaactccacaaggagtttgagaaatgcagtctcgtgctttctagcttctgccaggccggagagtctgtgcagaggggataaggtggggtagaacaagtctgtctgtgatatctaccacccagtctgcatttgaagtggaattatctcccgaaggcaaagaaatcacatgtcctattagaattctgcatgctgtgtgattctgatgccatgattcctataccttttggtcaggggtgtccaatcttttggcttccctgggccacgttggaaaaagaattgtcttgggccccacataaaatatactaacactaccgatggctgatgtgctaggaaaaaaatctcataatgttttaagtaagtttatgaatttgtgttgggctgtgttcaaagcagtccgcgggttgggcaagcttgctttaagtcatttgtgtggtgtgtcaagtagtgctacccaaaggtccctcaaaaagcatcattcgcccttgcctctcccagttccgagagaggagacagaattcagggctgagcctgtaggctgcgtgagtctcctgctcagtcctgagaagaagacctgggcatgggatgggatttagatgtagaatagaactgtttacgggggctcccctctgttccctgagcatgggttgtcattggttggcacaagtgccacggctgacaagctcctttctgagggagcagagcttgaccatatacaagatatgataatactgtttgtcaaggatacagcctgaaagaatgaaatagattgaccctagggaaggccactaaccggggaaagtaattccacttgtagctgcttttttttttggacggagtttcactcctgttacccaggctggagtgcagtggcatgatctcagctcaccgcaacctccacctcccaggttcaagcgattctcctgcctcagcctcccaagtagctgggattccaggcatgcgccaccacgcccggctaatttttgtgtttttagtagagatagggcttctccatgttggtcaggctggtctccaacccccgacctcaggtgatccactcgcctcagcctcccaaagtgctgggattacaggcgtgagccactctgcccagcctgtaactgcttttctactttacaggtataaataagtgttcctaagcaacccttcttaaaattagttattttaatgggactttttgtgttaggttattttagaaacattggtcacgtgtatatactttgggaattaaaaaagaaaagtggtgacaggttggaaaagtgtatcatccaacttctgatcaaacatggagcattaactctacacttatatcatctcttcctcctgaaaccccatgaagatgatagaaagacaagaagatcaagtgtgaggtacgagggaaaagggattggagaggaggcagcaggaggctgtagatgagatggcttgtgagacctttgcaggatagaaagcacttggagacacaggagctgaccagcggaacggggactgttgcagtcagagagcctgcagatcagtttacccgcgcaccctggacaggctcgaggacaggctgtgttggggggttgggggcgggtagggggcaagtggcaggagtggtgggaagtttacacacagcatggtcgccagctaactctgcaccatttcctgccaccacctctcccccttcccgaggaccaaatagttattcagcggagaagttgagaaagaccccgtagtccaaatgccaggtgtagcagagtgggaggtgaggacctgagaggagaagtctgcagactgaatggtggggccactatcctattttctgccgtccttcctcagacaccagcaactgatgtttatgtcacagtttagaagccagggggctgtctctgaagaaatggaatgggttcagagagaggactttcagatatttatatctgaaaacagaaattatactaggtatttcaacagagggatttaacacatggtaaagcccctctcccttttcccgccctccagtctcctgtggctgctcaatggcaggttctaacgaggagccagctggcaaaggggcctgcaaaaccagtctgcagagaatagtgtggaaaggtgggtttggagctgagaaatcagaagcgaatggcccacacagaggcaaataccagatcacatggttaaaaagtctaacagtcggccaggcgtggtggtcacacctgtaatcccagcactttgggaggctgaggtgggtggatcacttgaggtcgggagttcgagataaccctgaccaacatggtgaaaccccatctcactaaaaatacaaaattatctgggcatggtgacgcatgcctgtgatcccagctactcgggagactgaggcaggagaattgcttgaacccgggaggcagaggttacagtgagctgagatcatgctattgcctgggaaacaagagcgaaactgtcgccaaaaacacacacacaaaaccaagtctggtagtggttgcttttgggctgtggaacttggggctagggaggttgggacaggggaatattcattttgggggcagaagctaaagtgtgtagaaattaacttgacagtaatcaaagaggtagccaccctgcttggtttgaatcacagctccgtcactcacttgctgtgtgaccttgggcaagttacttaacctctctgtgcttcagtatcctcatcggtaaattgggtctaacagcagtgcctagttcctggggagtgacaaaaattatttaatactcttaaagctcttagaacagtgactggtatgtagtaaatattacataagtggtagtttaaaaacaacaaaaaaaaaaacacctgtaccattaagggctgagatggcagacaaaacctgagcttaggtgaagaggagtgtaacctagcaacattgtgctggactagatgaatccgcctcgtggaactacagccagtgagtaggagttgtggaaacagatttaatctttgggaactgttttgaattatttaggtatcggggctccgtattttacaagaagctgaggcagaagccatgtcatatggaccagctcatcatggtgtgagcataaggaaagactgacttcgtggcagatggtcattctaaggttccctcagggtcatcagtcatgagcccaaaatagcacgatgctgcagaggctgccatcctgagggatgcggctgccgatgtggttgctgcctggccttcatcccctcagtacccaggcagagaccgagtgggatggtaccacttgctcccttgggtggggaggacgattggagaaggatgagtgggctcacaacaggtgcccactcagcggaatccaatttcctgtctctgaaaggagaatcagtttgtgaaattgaccttaatcaagggtgatctgttcggagagtgctctatggatgccattcttttctgggtcttttggccagttatggaacaaagctcctcagtacctggcattgctttgacactggcatggagtcaggcatggtggctcatgcatgtaatctcagcgcttagggagggtgaagcgggagggtcacctgagcccaggagtttgaaaccagcctgggcaacacagggagagtttgtctttccaaaaaatgcaaaaaaaaattagccagatgtagtggttcatgcctgtagtcccagctactcaagaggctgaggcatgaggattgcttgaacccgggagttcaaggctgcagtgagttatgagtgcaccactgcactcccgcctgggcaacaggacgagacccccttcctaaataacaaaacaaaataacaaaaaaaacccttgcattaaccttaaactgggcctctcataactgcctggctccagaccattccagccccccacttccatgccctaaaatgtccagatcctgacctgcaattgcctgaggccatgggtcctgaaccccttcaccccttcaccacagactcaactgcatgtgcctttcctcctccctctttgctttcctcttctctttcttccatcatttctagtgaacattagataattaattttgttgttttcctaagatctacgttcttgagggcatgcaccgtgacttatataactttatattcactgttcccctgcccaggcagacccagcagaaaactaacctgtgtcattcatgttagttgatgaataagcgaataatgcaaatcaggcttttatgctctcactctctaacccactgccatcaggtgcctgaatattgccttctctccctttctccctcccatccatccatccatccatccatccatccacctgtccatccatccatctaactactaccccctcctcctgcagtctcccatccatccatccatccatccatccatccgtctgtccatccatccgtccaactactaccccctccccctccagtctcccatccacccatccatccaacccatttgcttctctgtacctctcactcttgagcttgttgacttaacatcaggaccattgatggttcctgcctacagtccccatcaccttcctctagcactggcgttttaacatagaaagcttaatgagtgcattcagttctgctttggaacaatgaaatgttaactttgtaataactcaagcctttcacataagggggaggaaaagattcatttcacaatgatactgagaattgtgtaggagctaatggaaaaaaggtcaaaggattttagatcctagaaatgggacaatgacaaaaattagtactattaagaagagtgatgtgctgttatgaaaaatatctacccaaatgtccctttaaaaagttatatttccatgtaagggttataattttaatattttggtctgtttccgtaaaagacattacatttctaaatttgaaggcaaatttccaatattaaaagatcctgtcaatgattcatttactcagctttaaatcttgtcttccattcctctttgaaaagacctgattattattaataatcagctctgcctaagttgtattctccttggatagaaaagctatgtatttgaagatcttatgctctacaagaaaatcctgcccagcgattgacgtgacaaacgctgaatatttcagtgcacaatgacggtggctttcagctcatgaaaggcttcctcgtgccttagatagtcttcaggtttctttcttagtgcaaacttttaagtggacccgtgatcctctgccctttacagcttttgtatccttcttgtgtcgattctatagctgttgtcagcaactaagcaatcttgttttttctttagatttgggaagctacaaactgtatctttctaaaccttccactcctctgccacttactgagctgttggaagcaaagtttaaagtataaatgcagtgtccacattcacagtactggattctttaatggcagtgagtgtggttattctggcatcacagaaagggagtggacttatgcaggggtgggggtggagagccatatttctgcacaatggcagtcaccttggaagatgtaggtggatctacctaagcctgatgaggacctcattggtgtccgggagcagggtgctccctgccctgttctggggaatgtgaaaatcctctactgctgaaggccttttgttctaagggcacctccaacccccacatcctagtagtcggctgccctcagacttaccacatgccaaatatgtttcatctttaagaagcatgctatctttatacaattgaatgcactctttgaatctattttacgttttatgattttaccttttttaaaaaaagtatcatgaggtatttcagatatgcaaagcaagtataaaggagaacggcgtgaatgtggacatacccagctgaccccttgaaggtgtaaaagatcagcagcatggccgaatgtcccttcccacatctcctgtccctcaagacacagacactgacctgaacttgctatttaacattccccttttagcttctttttaaatttttataacgattttaaaaataggaagaaaaaaaaggcatatatggcaagggcatagctttgggacatgctgtggtttgaatgtttattccctctgaatctgatgtggaaacctaatccccaatgtggcagtattgatatgtggggctcttaagaagtgactgggtcatgaaggctcatggattaatggaataatgggttcatggattaatggttatcatgggagtgagaccaatggctttgtaagaagaggaagagggacctaagttcgcaccctcaacccccttgccatgtcaggccctctactgcctggattctgcagagtcctcacagcaagaaggccctccccagatatagtccctcgaccttggacttctcagaccccgtaattgtaagatatacattcactttctgtatagatcacccaatttcagaaacagaaaatggatcaacacaggatgcatccatgctctacgtggacatcatcctctttcctccatttcattggccctgaagacatctgttctagatcctctgtctgttgcccttcatgaatttttggacactaaacttggcctttaagaaaatattaatgagctttttatttaaaaaaaaaaagatcactattcatgttgttgttactattacagtattaaggacgaactctgtgccaggcactctgctagaaactttgcagatgtagctccctttatttcttgcagcagtcctgcaaggcatcgttcttcctgttctcagatagggtgacagagcctcagtgagggcaagtagcttgtccatggttagtggcacaactgactctaaaatcttttaaccacatcaagttgccctagcatactagacgaaatgtgttaggactcagacatgtctgttttacatgatacttagatgggaccatgtgctgtggctgtgatttttttttcccccttagaggcatgttggatagggtgtcttgtaaattaatgccacttggcatggcaggccccacgagacttggctttcagtacaccctggcacctcctgcagtattgctggaaggagtctgattcaggccttatagatcatttatattacagagaaaggcatgtgagagtctggaagcaaatataaagtgcgctgaactccttcagaaatgggctctgaaaggaatcttagtgactttaaagagcaaagctaggaggattggctgcgctcatggaaattttccttttacccctcactgtatctggctgttaaatgcctgtcttccagctggcattctctttcttatttatcgtgaagagttagattatgttaaattgaaaagtgacactgatgtattagaacccatcacgttagattgaggacagatacctgacttaaaatgtgccctttctgaagcatcaactctgaaagtatttggtgttcttcccatattatacagttatacgataaagtcacaagaatgggtttatacccatttgtattctacttcgagtcaagtagtaaaaatctgtgaaattgactgattttgctcagaataatatcagagagggcaataaatctaaactttggctctcataaaatgtgtttctgggaaggtaatgattcatgatcagatgcacacacagacatcatgagagtgctaagaaatagattcataatctttggctttaaaaatcgtagactgttttttgagctcaaccagcctgctctggagttcgacaattctgtgtagtctttctctttctttggctctcttgatttgcttacaggcataagttcagcctcctgtgatgtgttgaagaggaagaaataatgattaaagtgatagaaaacagttctgcaaaatgaaagggagaattgaatttgtgtaggttaataaaggcaagactaatgtaatgcggtctttaagtataagtgaaagctatgctaaagcatttatcctccgtgtccacggatggtcagaggaaatggaaggggcttaaatagaaatggagaggtttctttggctgtgaaaaagaatttcttaatcaggaaggtaaagggcatagcagtggatctcagaatgatactctgaagctgtttcgctgttgcttccctttgctggacgcagagctcctcaagggcagggcgacccctgcacattccctgcccagagcagtgctggtcccattcatcagtaatgcccctctcccccccagcctacaatccattccaggaccccacctgctggctccactttcagtacatagccaggcgcaaccacttcttaccatctccctcgtgaccaccttggctcaagccaacatctctgggcactgggttcctttggctgcccccaggtttgataacaaaaatggctttcattgtttttgatttgtttcttttgattattaaggctgagtatttttcaaatatgcagtattgattattaattttaaatgaatgtgttgtttgctgtacacatttttgcccattggcttttcagttttcttgttttttaaagagactaaagttatcaatgttatatagtcaagtatattacataaattttacatttagaaagtaagttcaaatgtagcaattagatatatacttaactaagttttattttagatacacataaatgtgatcatatattttctttttttttccttttctttttctttctttctttctttcttttttttctttagagacagggtcttgctctgtgtcctgggctctggagtgcagtggtgcagtcatagctcactgcagccttgacctcctggcctcaagtgatcctactgcctcagtctcacaagtacctgggactacagatgtgtgccattgtacctggctaatttttaaattttcgtagagatggggtctctaacccctagctccaagcattcctcctgcctcggcctcccaaagtgctgggattataggtgtgagctgccacacccgtcccatatataccttttaaaaaggttcatcttttcctgttttcccttttcgcttctttcaccttttctttttttctctttccctccacatatataaataagctaatgtatattttcttatttttctgtatagtcatttagccctatacagccatgtacatgtacaagaggggtgtgtatacacacacacacacacacacacacacacacacacacagtttttattgccgatgttttaaaaaattagatcatattttatatgctttactctatgttttcatacttaatacctaaaaaaaatcatggaaccccatttacatagatctaatttattcttttaaatatgtataatctcccatgctatgtatgtcataattgatgaagtttttccacaatttcttttcctttggaaaagccccctggaattttattttgctgtatggcatgagttaaggatctaaatttttttaaatggctagtgaatggttccttgatgttttcagaactgtttctctcctgttgatttctagctcttcctttattatatattaatgatttatatccactatggtctgtctttcagctcacttttctgtacagatgtcaactttttgttgttgcttttgagatcattcaaatcacttttttatgttgaaataacttgagacttataaaagagttgcaagagagttctggttttcccttcacacagatttctgtaatgttaacatcttacatgaccctagtccattcatcaaaactaagaaattttcattggtacagtaccatttactagagcctttttcccagttttttttcctgattatcttttcctgttctgggatcctttctgcactcccatgttgcatttagtcaccatgtctctgtagacttctccaatctgtgaccttgtcttccatgaccttggcactcttttttttttttttttttttttttgagacagattctgtctcttttgcccaggctggagtgcagtggcgcgatctcagctcactgcaagctctacctcctgggttcacaccattctcctgcctcagcctcccgagtagctgggactacaggcgcccgccaccacgcccagctaattttttgtgtttttagtagagacagggtttcaccgtgttagccatgatggtcttgatctcctgaccttgtgatccacccaccttggcctcccaaagtgctgggattacaggtgtgaaccactgcacccagccaaacttgacactcttgatgagtgctgacccgttgctttttaaaacgtccctcgatttggacttgtctgatggtttctcacgatcaagctgactcatcatctcagggcacttggcgtcaacatgacttgtcactggcagcgacagggtggtcactcggctaaggcggtgtcagccagtattgttccctttccacattctgttcttagaagcaagtctcttagcccggcccacatgcaaggggagagtagttaagccccctcctactagaaggagaagtgtcagtgactttgtggacacacattaaaactaccacaaaaaattaattaaattttgcgtagatacttggaggttatgcacatactctgcttttctttgaagttgtgcccactaattttagcgttcaccagtggatcttgcctgcagtaactgtttctgtggatttctaatggtcatttttctcttcccctcattcttctacatttattaatttgaattctcctgcaaggaaggtttgtctcttcgccttcaattatttattattcaatcattatttgtaattgtatggatttaatgtcattggataaccagtagaataagtccctcatgtttcttctcctctttaaaaaatcttgggcctttttattacttttttgtttcttcttataaacttcaaaatacttatttttcgttttcaggacattcagttggtatgtactttgaaattgtgttaaatcttccaactgaatctggaaagaaatagtatctttaggatccagtaattcttctatctcaaattgtggcatgttctttccattttcccagttactcatttaggccccttctaagttattcacttaggcttctcggtgttgaaggcatacgaatatgttagaccctgtttatcctggccaggtgcagtggctcacgtctgtaatcccagcactttgggaggccgaggcaggtggatcacgaggtcaggagatcgagaccatcctggctaacatggtgaaaccccgtctctactaaaaaatacaaaaaattagccaggcgtggtggcgggcacctgtagtcccagctactcgggaggctgaggcaggagaatggcgtgaacctgggaggcggggtttgcagtgagccaaaatcgcgccactgcactccagcctgggcgacagagtgagactccatctcaaaaaaaaaaaaaaaaaaatgacctcgtttatcctaaaattgccatactgggctcgtgacttctctctacccttgcctgagtttacttgctcctccaaatgctaaatttggaactaggtgcttttgatttgtatgtctaaatttgactaaattactgtaaagtgaatacttagttcatggggttttttaaaatttattctatgcttttctttctttgtctcctgggtgaagttttgggtccttgtctccatgagatggaaaaatattcctttcccagaactttgttactgtttagattactatgcaggttctgtgataaccttcaagtataggtgattttataaaacagatgtttttggtgagattgtagcagggttgtgggtttggctctcagtctccaacgtttctgttgggcaggatttgcatttcatatcctggcatactgtattaggaagcttccagcctgtgtgtctaatattatgggggaacacaaaacttccatttcctaatttttaatcccttgttctctcaattcttagccagctggcactggagtaatggcatgtaaggatcttagttcccattattcattggtgagcatttctaccctgactgatgtgtgctcagctacactaatcgccatcttttacttacttacttacttacttatttatttatttatttatttatttattgagacagagtctcactctgtcacccaggctggagtgcaatggcacaatcttggctcactgcaacttctgcctcctgggtttaagagattctcctgcctcagccttccaagtagcttggattacaggtgcccaccaccacacccggctaattttttgtatttttactagagacgggttaaccaggatggtcttgatctcctgacctcatgatccgcccgcctcagcttcccaaagtgctgggattacaggtgtgagctgcctcgctcggctgccgtcttttatttttttaaagtcaagtactgttttctctgccatcacataccaaatgattcagagtttttcgtctggatcactcctaaatatacacacacccaatccctgaatcagaagaccaaagtccttcataccttttgagatagcttattgacctgtagaaactgtggtgcattggaagcccgggtataccagcagcctggcccagtttttgtcttggcctagtggacttgtccttgttacagttcttggttctagttgaacaccctttaactttcttttttacacgtttttacaccctttgtccttcccaccctaacagaaatgtcctgaactcagacatttgcacaacaaattgaaatttttggcaaattcctttcattttcctagtatattccaaagcacagttaaactagccagactaacctgatggtttttgagcaagggaagacatagatgcggatgattaaataagacacatcactatttcatttatgagacattattgtgtaattagctatttcatataactgggtttttaaaatagctgaatgtaatatttcatcaatataacctttcccccattctttgtggttgggttaatgaaaacttttctaatatgtcttcacttctctttggagcatagtgcatataatttattctctttccaatgtcattgcaaggttataattaaaagcatgaattccctgtttcatgaccctagagtctactgaatgtttaatccttttttaaaaaattcactaactgacctcagctgtgcattctgagttcttacggctacatttatataatttacttatgaccattgtagattgtcattgtgctctctctctatcgtcctctctccttagccctaagggttgagcaaccagatcatcaggtttgacgaaaacaggaaggagggcctgggagggatggattgatgatgagtccttctcattgataaggaccctgagcaaggcctggtgagttctagatgctgtggctgctcccagcttgcatctctgtctctctggttccttctcctcttgcttccttggcctcctttggcccttggaacacgcccagcctgtcccattgcagggcctttgcacttggagctctcttctgggttttctcacctccgtcttcatgtggttctccctgttttgtgattcgattctcaaactccaacatttgtgtctccctgaaaactccagtgagaactctctgctgaccagctggaggatgaaacagcttgttagttttagtttagactttctgctttcatggattgagtaggggtattcctttttcttttcttcagcagagctgttctcttttactttttaactttttactgtgaaactgtacttaattatacattcacagaaggttgcaaaaactattcagagaagttccatgtacccttcacccaatgtttatattttataccactgtagtgcaatatcaaaaccaggagattgacactagtacaatgtgtgtttgtagttctttgtcattttactacatgtgcagatgtgtgtaactaccactacatccacaatacagtgctgggctggtctcacgcctgtaatcccagcactttgggaggccgaggcaggaggatcacttgagcctggaagttcaagaccggcctgggcaacataccaagaccttatttctaaaaaaataaaaataaataaataaaaattagccaggcatggtggcacgcacctgtagtcccagctactcagcaggctgaggtgggaggatcacttgaaccagggaggtcaaggctgcagtgagccatgatcatgccgttgcactccaacctggggagcagaatgagaccctatatcaaaaaaaaaaaaagtgctacagagctgttctgtcaccacagacatccatcccccttgtgctgccctgtaattgtcataccttccctggcagcttcccaacctggcagccgctaatctgttttccatctgtacagttttctcatcttgagaatgttatgtaagtggaccctacattaggtgaccttttgggattggcttttccccccacttaacctaatactcttgagacccatccaagttgcatgtatcaatggcttgtttctttttattgtgatgccggattctgtgcaacagaggtagcagtttaactcttcaccaattgaggaacatttgttgttgtttttgtttttgtttcatcccaaggttttggttgttacaaataaagctgctatgaacatttctattcaggtttttgcgtagatgtaaattttcatttctctgagatgaacgttcaggattataatcggtgggtcgaatgtaagtatatgtttggctttttagaaactaccaaagtattttccactgtggctatactatttttcattctctcagcaacatatgagagctccagtttctctgcattactgtttttttacattagccattttaataggtgtggaagggtaggtcatcatggttttaatttgcatttccctaatggctagtgatgctcaacactttttatgtgcttatttgccgtttacatattctctttggtcaaatgcttcttgttgtactctgcccattttcttttcttttcttttctttctttctttctttcttttttttttttggaaacaaagtcttactctatcacctaggctggagtgcagtggtgtgatcttggctcactgcaacctccacctctgaaattcaagcaattctcccacctcagcctcctgagtagctggaactacaagggcatgccactgtgcctgattaatttttgtatttttagtagagaaggggtttcaccatgtggaccaggctggtctcaaactcctgacctcaagtgactcacccacctcagcctcctaaagtgctgagattacaggcttgagccactgcgcctgttacactttccccattttctaattggatttttttaattgttgacttttaagagttctttatatattctagatatgtatgctttatcaaatttgtgttttgcagatattttcttccagtttgcaactggtattttcctctttttttttttttttttttttgagacagagtctggcctgttgcccaggctggagtgcagtggtggctggaatgcagtggcatgatctcagctcactgcaagctccgcctcccatgttcacgccattctcctgcctcagcctcctgagtagctgggactacaggcacccgccaccacgcctggttaattttttgtatttttagtagagacggggtttcaccatgttagccaggatggtctcgatctcctgacctcgtgatccacctgccttggcctcccaaagtgctgggattacaggcatgagccaccctgcccagcaatattttcctcttaatagagtctttcacagaacaaaacattttaatgttgatgaagtccaattgactgaattttttaactcatgaattatgcttttgctgtcatatctaagaactctgcaatttctctgatatcttctcctaaaaattttacagttttacaaatatatttatgatgttttatgggtttatttttgtattcagttatatgagggtttggctgaggtcagttttcttttttcttaagaatctccagttgctttggtaccattgttaaaaagacttcccttccttcacagattggtttttgccctttgtaaaaaatcttttggccctactgttacgggtctctttctgagttctttattttgccccattggcctatttgtcttttcctttgccaataccacactggatatagctgtatatctggtagacttattcctcccactttttgcttctttttcaaaattgtttttgctattctaattcttctgcctttacatattatttttagaatattttctctataggaaaatcttgctgagattttgaaggaatcacattaaacacgtaggcctgttcggacaaaaccagtatctttactttgttgtgttttccaatccatgaactctttatcactctccatttgtgtagaactttgatttctttctttagtatttttgtagttttcagcatacaagttctgtacgtatttgctaggttctcacctatttctgttgagtgattgtcagtggcgttatattttaattttggctttcacgtgttcattgctattatagagaaatacaattgggggtggaaggattggtgagatattggtcgaaggacacaaaattttagttagaaggaataagttcaggagatctattaaacggcatggtgactatagttaacaacagagtgcatacttgaaagttactaagagagtagattttaaatgttcttaccacaaaaagaaaaaaaatacatgaggtaatgtatggttaattagtttgatttcaccatttcacaaggtactcatatatcatgttggacaccataagtacatacaatttttattcgtccattaaaaagaaatttgtgctatattttatgctactaaaaaatacagttgttttttgtatgtgtatcttgtattctgaaacccttgctgaacttatttattacttcagtgagtgttgttgttactgttgctttgtagattccttggtatttcctgtgtagaccacgtcatctgcaaatagaggcagttcactttttcctttctgacttgaatgcctttgtattgatgctcaaattgcccctttcttgggtagcgggagcctcttcaggttgattcttgagttcttgtgacatgacgtagtctttgctttcttgctatatggtataagatgttctgggttcctcttgtactttttctgccctgacctataattaaccatttctctaaaatgtactggttcttttttgtggcaaatggtattttgagaccatagcagttcccccagtggagactgtagactgtagacttatagagccttgatagtctcttatatattagtaaattccccagtaagtgctcaataattgtttgtcagaagagtaagtgaattagtgaacaaatgtatgaaacacatctagtgctagtctttgcttggtggccaaaccaaaacaagaaaaacatcatccagtgtatccaaaaaagaaatattgtcaaggcaattcagatcattagtgatctgtcaaagaatgaccaaattaatggagaaccaaaacacttctctttaaaccctttttctccttccaagtcacctccttgtagctggcctggctcctttgccccctcttcttcctttacagagctattctagttttcgtgcttctctcctcagtgtgaattttcaaggtgttcctcctcctatagatctctgttgctaccacaaactgcatgataatgccctgaggtcaaagacaaggaaagactgcaaatgcttggcttgtagccctcccaccatcttcaaagtcagcagcgtaaactttctcctctgccagtgactcttctgacttctctctcactgctgggactttgtctcacatggactcacccaaataatccaagacaatcttcccatctttagatccttaacctcaccatatctgcaaagtccctttcccatgtgaggtaacgtatctctaggatgtggatgtccacattaggatgtggatgtccacattaggatgtggatgtccacattaggatgtggatgtccacattaggatgtggatgtccacattaggacgtggatgtccttgggggcccttattcggcccaccacgagaaggctcatgtgacccaacagacggctaaagagttgggccccagagctctgtgatgctcacccttccctgccttctccacccagcagagaccgttacctttatagaccctagcgaagaattttctgtggcctttggtcctttgcagaacttcacacctgttcatttgaatcattttgcaccagttacatactgcttgtggcaaacctaaaacgcctgtggagaaatgtgacgaggactaagaacaaatacatcacaacctatgaaaccacgttgcagttctctgaggagatgaatggagcaattacgttttatgttattgtgttgtgtttgtcatggaaatgaactgcacaatcattaactggcaggtggtggagacgggaaaagtagctgctgcccctttttctatttttatccagttttttcccgtttttatttttgtgtggggttgtctgggaactaagagtgatattacctaaatttgcttcctgcctgtatcttacgtgtgtattgttgtggttaataatgttttcaatttactcagactttctcaaaacggccctttttgagttatcgatagctgtatttcacccaggcaaatctgaagttgtcatcttattttctcattttagatatatcctaatgttaaataaaaaggaatttataaagccttacctgggaaagtccaaagttcttaccttttgagaaaaaaaaatctaccccatccccaaaggaaactgctttcattagtcttcatggacggaacccagggctcatagctctgcctcttattagcgggactgacagctgcctagtggagaaggtaacctccagaacagtcccaaagaaggccaagaaggcctgcctaggagggttctatcaggataggaaggggaagtgcttaacgctgacacacataactcgggtggtgtgggggctccctcttgagacccagcatgctgtggtatagtcgcgctcccggtagatggtaatgccaggggctgcctcaagcccaaagattcagaaaatctacccctgcatttcgtcaccagttttgtgatcccctctaccataggccaggcctttcttagccagtgggggtatctgattggagacctatagaaagggggagacagagacagacaaagacacacgaagacaggcacacagagagaaacagagagagtgggccaaggtgcagaactgttaacctcacaacaaaggtttgcacagattcctctccctggcatgttgtctcactgggtctggggccagggagatgacagagacaaccattaaaggacttgatgagagaatacatttgggatgggcacaggctgggaggctgggttagagtcttgattgttcatgttctttggcaaaattatttgacctctggtagcctctgcttcctttctgtaacatggagataataacagcagctaagcatttctgagttttaagtgtatgccaactgtatgtaccaatcaccttttaatatctcgtttaattctcctgccaacactaagggatggatacaattattatccccatctgacctgcgcattggtgctgtcagtcaagcatctggcccgttgtcaaagcgtcaccagctaggaagtgtcagagaagggactcccatgcagtcatctctggatccaaaccttgatgttaacccctggttgctgcaagggaatttgaatccctgtgggatgaccgtgagggctaggtgagatgcatgcagagcacacagcagttgccaggcccgtggaacgtgccctcctcatcatgacggcgaggagggcagagcagaagctttgtagagaagaagagttgacggggagcatggtgccccttctgagaagtgacaaacaactccaggtggtggttgagtgaggagcagatggagggtcggtccctagggaggtatgtccaaagccagcaggttcactccctctgaaatcctacacagaaaaatctcagaatgctgaaaggatgccagtgtctgtctcccaactgtggctaatggttcagtgggatttgcttactggcaacttctgaataattcccagcacaggtgtaaataatgcaaggcctcaatcccagcccgacctgcaccgtgaggcagaagagacatgtgtgtcacagttaaccaagggtgcagtaagccctcctgaaagctcagtttaggggaccaggattttaaagagctcccagccttgttgataaatcagtttccacctgatggctgtttgatacatcagtttctacctgatggctgtttgaccatttccctgtacttgttttccagaacagtgtccatcgtcacagagagtgatggcactggcgggctgtctgataaagcaaagaacccaacagatgttgtttacacacaaatgccatacctatcgtagtagcgttcagaaagaaaaaaaaatcattaaaaattggattttcatattgatttattttcatcttcattgttgatggtgtttgtgcgtgagcatgatctatccctgtagttaggggagcctgtgttttgagtcgtgcactgaggatccagcatcaccaagggttattaggctgttcttgcattgttataagagaatacccaagacggggtaatttataaagaaaaagggttgaattggctcgtagatctgcaggctgtacaggaagcatggtggcatctgcacctggggaggcctcaggaagcttctaatcatggcagaaggcaaagggggaggaggcgcgctacatggcgagagcaggagcaagagggaacgagagaagggggaggtgccacacacttttaaacagccagatctcacaagaagtcactatcgtgaggacagcaccaagaggatggtgctaaatattcatgagaaatccaccctcaagactctgatccagtcacctcccaccaggccccacctcccatactaggaattacagttcaacatgagatttggatggaacacagatccagaccgtatccctgagatcagctgtgctcgaggtgctgtgagtctgccttagccatcgcaggtgctcccgtctctgctgggcacagctttgtcactcggcaatcgaaaagagtcttaacacgagagtggaaccctttggtcaaaattatgctccttcaaagaggaacaaatgtggtgacagactggaaaggtgatggaaagcatttcaaaaagcagttcactctgctcataattttctagtattcctctgctattatttgcttttaaagaagagccctctgcttcctagcggctgctgcgtatgcttggtccagccacgaagacataatcctctgcgggcagcatcacgtggagcgagggtcaagtcctctgcctggtgcgcctttatctgcacaagggaagaaggaatcctgagtgcctcgttccgcagaaagtgagacacagaaagcatttgacttgtcaggaatcgagaattaccagccccaggcttccccaactcagctcacgaagtaagaatggctgggccaacgcttctctgcagaggctgcaggtgcggacaccgacagccatgcacagtcctcccaggaatattcttgtatctgctgtgtcttgcttagccatggccatatttatttaatttttgatggaattatttattgtgttttattctcttgctatataaactgagctgatttcagaattgactgctgtttgcagagtatcctggggagaggaggattcttcatgaggagcccccccatatctggagcagttttagttggtcctcatctactttttagacgcctttctgtcctcacttttcatggtttccaatttgactggattttacactcttgggaagttccactgtttaaggatctaaagactgaaaacatgtattccgcacattttgtttaaatcatgtttcttttttttttcctggaatttttattttagcagaaaaagtcttggctggaaatgtttctgcctaaacctgggctctgtaaaaactcctccttcatgccgttcctctgcatatgaccacaccaggaatttggcatagccatttatttgtacctagtgctgaaacaattagttaaaataacaaaaggcccctggataagtacaaattgactgaagtgcttttgaagattagcaaggaaatttaagaaacattgctataaataaaaaatatatttattctgggcaaaaatccctgatgaaataaatccttcactagttacatcaacagttaccctataatctcttcatttcttttctgtccctcctactagacagcatctttcctaaaggaaaagaatcaattctatttatgacacataaacacatgtggagaaaaggccagggattttccagcactaaagtcttgtaaagtggattttaacgttcgtggcatctgggtggaagtatccgaagacaagttgtttctaggcctctttgctaaattattacatgtacgctcttgagcagatgggctttgttttaggtaatagaggcttctggtcattttatgactctaatgtgataattcagtgaccgagctgtgtttttacagaagcctattaactaaaactctaggaagtatttgatatttagcccctagaagaggacagtagatgacatttactgttttcttacttgccagtcacattctacacctgatgaaccagattcagacttagcgtacatggaatttgtagcttctgagccagcctcattcacctcactaccgatttgcacttcatcagtgtccttttgatgtcagaattgttatccccattttacagatgagaaagccaagtgatgagcctgtgggagtaaaatcggggccagatccagttccacttctcttgccccacccaggtcacagttgcctgatcgcgttaagggcctctctatattaagacagaatatcatggtgtcattgatggtgttacttcctgtcaactgtgatcatcttgttctggtagaaaagtgaggtgtcttctctgcagaccacattagattttaactttaagtcaggttcgacactacttctggttccaggaaactcagggagcttggttgggagaagatgcaagagctctgagctcacatcttctttgggctttaattcagagaccgacaatatgcacccaggcagatgtccctctgtgcctcttttctgaccacccaccaaagcccctctctgctgctgctgttggccatggtgctgggagtagtcagggagccccaggccagccccgcagttcaggagggagttggatgtgctgcctggccgtgcagaagcccccggccagagctccggtggaaggcacgtgggtagatggtcagcagggatggcatttcctcccacgccacctgcagaagcagccattctgttcctgagttattaataccttgtaggctagagaactgggtctgtcttgctaatgtgatatcccatcagatttttacactttcaaaagctatcactagggaaacagatgtggttggacctgcgtgctttgtggtgactttgctgcctgtgtggcgtatctacttttcctctaaaactctgtaaaatgaacagactggcttcacacacttcatactgccatcatttatctttttatgcctttgcagctcttgccagtaagatatccccttgtgttcaacaaccatattttccagtatgtcttccctggacagtgttaacacacacagtaggcactgcaaagatatttagaaaatggttaaattactcctgtatttgcttgggttccaggtgcctgaatgtgcaagctcagaaaggaatagtcagagtaaaaatgcaaatacaaatacttagagattcccttctttttcttcattaatttaacacacatttatcgactacacactgtttggctctgtgattaaatactggaggatccttgtgtgcagggaaaacaaaggtgtatctgaacgtatttcaaatccaaaggattttaaaggagttaccattttagaaattccaccctgcaacttaccaccgcttgggtctatatttaagagttgagagacagtcaatatagaagagttggatagaaggtgaattcacataaattcaatggaatttttccatatacttgccattatgagattaacaatgactctcctagaaaaggatgcccgcgtagactaacttgaaatgtttttcaaggcatgggccattatggtaactaaactggtggaggcttgactggtcttttcctgcctctagtttcttccctctctggtcatcttttggtctttctcctactgcagaagtataacttaccctttcctgaagaatcacagttctgaagtttaatggctttctcctctgagcaagcctgcctgcctgaatgcagttgtgctgagctgcaatcccatttgcccaggacttcttggtctgtgctagggattcatgcattccattaatgaacacaactcagctagtggtttctgttggtttgaaatcacgagaaacaggtttcccaaattctttcttcttttgcttttaagatgtttttcttacacccagagcaaatggtcagcagcaagtgtttgctcttgatggaataaacatatcactctggcgacttaacatgtactgagcattcagggactcattagtgccaaaactacttgaaagcaattttatttttatttatttatttatttatttttattatactttaagttttagggtacatgtgcacattgtgcaggttagttacatatgtatacatgtgccatgctggtgcgctgcacccactaactcgtcatctagcattaggtatatctcccaatgctatccctcccccctccccccaccccaccacagtccccagagtgtgatattccccttcctgtgtccatgtgttctcattgttcatttcccacctatgagtgagaataggcggtgtttggttttttgttcttgcgatagtttactgagaatgatgatttccaatttcatccatgtccctacaaaggacatgaactcatcattttttatggctgcatagtattccatggtgtatatgtgccacattttcttaatccagtctatcattgttggacatttgggttggttccaagtctttgctattgtgaataatgccgcagtaaacatacatgtgcatgtgtctttacagcagcatgctttatagtcatttgggtatatacccagtaatgggatggctgggtcaaatggtatttctagttctagatccccgaggaatcgccacactgacttccacaatggttgaactagtttacagtcccaccaacagtgtaaaagtgttcctatttctccacatcctctccagcacctgttgtttcctgactttttaatgattgccattctaactggtgtgagatgatatctcatagtggttttgatttgcatttctctgatggccagtgatgatgagcattttttcatgtgttttttggctgcataaatgtcttcttttgagaagtgtctgttcatgtccttctcccactttttgatggggttgtttgtttttttcttgtaaatttgtttgagttcattgtagattctggatattagccctttgtcagatgagtaggttgcgaaaattttctcccatgttgtaggttgcctgttcactctgatggtagtttcttttgctgtgcagaagctctttagtttaattagatcccatttgtcaattttggcttttgttgccattgcttttgctgttttggacataaagtccttgcccatgcctatgtcctgaatggtaatgcctaggttatcttctagggtttttatggttttaggtctaatgtttaaatctttaatccatcttgaattgatttttgtataaggtgtaaggaagggatccagtttcagctttctacatatggctagccagttttcccagcaccatttattaaatagggaatcctttccccattgcttgtttttctcaggtttgtcaaagatcagatagttgtaggtatgcggcgttatttctgagggctctgttctgttccgttgatctgtatctctgttttggtaccggtaccatgctgttttggttactgtagccttgtagtatagtttgaagtcaggtagtgtgatgcctccagctttgttcttttggcttaggattgacttggtgatgcgggctcttttttggttccacatgaactttaaagtagttttttccaattctgtgaagaaagtcattggtagcttgattgggatggcattgaatctgtaaattaccttgggcagtatggccattttcacgatattgattcttcctacccatgagcatggaatgttcttccatttgtttgtatcctcttttatttccttgagcagtggtttgtagttctccttgaagaggtccttcacatcccttgtaaggtggattcctaggtattttattctctttgaagcaattgtgaatgggagttcactcatgatttggctctctgtttgtatgttgttggtgtgtaagaatgcttgtgatttttgtacatcgattttgtatcctgagactttgctgaagttgcttatcagcttaaggagattttgggctgagacaatggggttttctagatatacaatcatgtcgtctgcaaacagggacaatttgacttcctcttttcctaattgaataccctttatttccttctcctgcctaattgccctggccagaacttccaacactatgttgaataggagtggtgagagagggcatccctgtcttgtgccagttttcaaagggaatgcttccagtttttgcccattcagtatgatattggctgtgggtttgtcatagatagctcttattattttgaaatacgtcccatcaatacctaatttattgagagtttttagcatgaagggttgttgaattttgtcaaaggctttttctgcatctattgagataatcatgtggtttttgtctttggctctgtttctatgctggattacatttattgatttgcgtatattgaaccagccttgcatcccagggatgaagcccacttgatcatggtggataggctttttgatgtgctgctggattcagtttgccagtattttattgaggatttttgcatcaatgttcatcaaggatattggtctaaaattctcttttttggttgtgtctctgcccggctttggtatcagaatgatgctggcctcataaaatgagttagggaggattccctctttttctattgattggaatagtttcagaaggaatggtaccagttcctccaaggatacccaggaattgaactcagctgtgcaccaagcggacctaatagacatctacagaactctccaccccaaatcaacagaatatacatttttttcagcaccacaccacacctattccaaaattgaccacatagttggaagtaaagctctcctcagcaaatgtaaaacaacagaaattataacaaactatctctcagaccacagtgcaatcaaactagaactcaagattaagaatctcactcaaagccgctcaactacatggaaactgaacaacctgctcctgaatgactactgggtacataacgaaatgaaggcagaaataaagatgttctttgaaaccaacgagaacaaagacacaacataccagaatctctgggatgcattcaaagcagtgtgtagagggaaatttatagcactaaatgcccacaagagaaagcaggaaagatccaaaattgacaccctaacatcacaattaaaagaactagaaaagcaagagcaaacacattcaaaagctagcagagggcaagaactaactaaaatcagagcagaactgaaggaaagagagacacaaaaaacccttcaaaaactcaatgaatccaggagctggttttttgaaaggatcaacaaaattgatagaccgctagcaagactaataaagaaaaaaagagagaagaatcaaatagacacaataaaaaatgataaaggggatatcaccaccgatcccacagaaatacaaactaccatcagagaatactacaaacacctctacgcaaataaactagaaaatctataagaaatggatacattccttgacacatacactctcccaagactaaaccaggaagaagttgaatctctgaatagaccaataacaggagctgaaattgtggcaataatcaatagtttaccaaccaaaaagagtccaggaccagatggattcacagccgaattctaccagaggtacaaggaggaattgaaagcaattttagttcttgtcgttgtacagctaaggaaagttcatcagtttctaagttgtctgccttgaacttgcttaaattgtgaggcatgagatccagattatactcagaacactaagccttggaatcaacccttttaaaagttgcttaattaaaatggagaatattttgaagtggtttttttttttaagattttacaaactaatattctgcatcttcctgcacgctgaccttctgttaatgtacttgaaggtcaattgaaactagtcaaatgttactttaaagttcgtagtggtaaaactatagactcaaattatgcttctatgtttaatgggcaaagttattattttactaaacattttactgaattttcatcataatgtataaattgatgtggatattaccaccctagtttgtggtaagtgttaaagagcaaaatacttattgataaccaaagacaatttatattttcatggaagccaacggatgggttacagtgcaagttttgggagctcatcatgaaaatgttcacatcatgaaaatatttctggacacctcctggaactcttccccttgggtccatagatactcttaagggaaagttgttaaagtgccccctgttacttcttacagcttgtaagtacacccaatcgaagctctatgggacatgaacagtgtgtcctggttcaggttagtgtctcctccactctgagcagggagtgggatttccaatagttgctgattaaatagtgaaacagttacttgattctgctccagtggtgatcagggtgaatgtatactcttactcttccttcctggtcttcaggcacctatgcagtgcccagtgggctgttttcaccaaccataaatcctgtgcttccaggattccgacgtcagtatcacatccctgaaggcagctgatctggtgtggtctggggaaggccacaacccctggccatgcaaacatagcagggagcttcccagtcgatgcctagcaaggtggccctccctcccccatgcccaaggggtgggtctagccatcatctcaatgcaggtggtcagagacccagctagctactctcttcctcggatttcatcttttctgaaatagagaactatgattttgcctagcacctcaggagagtgttggagaatcaagtgaagaatggccagaagcacttagcgagtgctcactggaaatggtcttcctttactgaactgcacagatactttgctcatcagtctcagcaatgaaaagcaacagattgatttctctcttgtgaaaacccttcctgtgcttataattcgtacctcaggaccggttagcttgttctttatgatgtagcagtgtcttctcccgagcggcagctcatctcatccatattgtactcagttatttttgttcctcttctctttactactatcccatggaattgggagttaaaatgatgaggtttcatttttaaatgtacaaagatgggggaagactaaggaagtaattttatttaaagccacacatacatttgtttcaataaagttaaaggaaaatctctcaggccaaatattgtaatttttctatgaagtcagtgtaagttttaaatgtgtcatctggagctatgttataataaggccaggtaattcatattatgggcaaagtattcaactttgctaccataattactcagcatgcccctgtgttcttttcattaccttctgatagcaaaagtgatatttattgtggaaaaactggaaaatattttaaaaggtagaatcaaaaggaaatggcctgtaattgtaccactcagactaaccactgttaaccttttatgtgtacacacatatgtagaaacagatacataggacttatttgcagtgcatagaacccttaaatccaaaaaagatgtcatcgcatgtgctgttgtgaatctgtattggagtgttttgatttctagtgacagcagccctaacttatcacggttcaacaggaagtatctgagctcatgaaccaggaagtccccagacaggacaggctgctggatggttggttcattggctctatgagataatgaaggacccaagtgctttccgttctctctattctgctgccacaattatcagcttcatgtgaaggtcatttctatcatggccataaaatcaccaccatgaacacgttggacaaaatgatcaagacccacacctgatgctgggaatggggccagctctcttgtgttgcatggctggattgcagggggaaggcatggttgccacgacaaaatcagggccgctaagaaagaagacaggatgggcacacgatacttgctttagtgtctttaaatatggttttcttcttaaggtttacagcagttaccagaatttaaaattaagatgaatggttttggatgttttattttcatttaaaaagtcagtctcttgtagaaatgctctgttcagaaagatttggataggaacaaagacttggtttctgggaaattaatcttcatgatctccaaagatgtagcattttcatggtgtctttttggcagcagcagttttttttttttcatgaattttggcttaaacctttatagaaattaaaaactaaaagaaaaagataagcttaaagataaaagttataatagatggaaactttaatatttttatctttatgtacctttttattttcaatactcttgaaataatgccgtaaataatatcgagaattcatggatattttataaggatacttctgagaaacaataggcatatttgaaattactatggtaaaaatcagatgtcaaagaaaaagttatatattcagtttttaaattgtactattaaatgtgtaacttcatgtgtagtaaatattcatatttaattttagctgccagtgtaacatatactaaaataaaatggaacaatttctatggttctataaaagaatctataaaggagtcataaataattataataaaactctattgaaatatttttatgagactaaaaattgaaaacttcctaatagggaaattttcataaatgagacatgaagtaagtcatagagacctcaaacagtaatatatcctatgggaaccctgaataagcaataacttcttaagataattttatataatgtgtaaaaatcaagagtttttgaaaaagctctgcaaaaggtagcaggaagaaaaaggattattataatgctaaaattcctcatgagagattactcattttgcatgcttttgatgttaccagaatacagattttagataatctgaatctgaaagtgctgtaactattccctatagagtaccacaattgtggtgggtaacacaactcactctagagacctaagatgtttctcttgtttttgaaataagagcttagactaaatgatattttggtgctcagaatgcatcttaccttctatgccaaattcaccagccaatgaatagtttactcacattcatattttttttctttcttttttgagacagagtcttgctctgtcaccaggctggggtgtggcggcgtgatctcagctcacttcagcctccgcctcccaggttcaagcgattgttctgcctcggcctctgtagtagctgggactacaggcgtgtgccaccacgccgaactaatttttgtattttcagtagagatgaggtttcaccatgttggccaggatggtctcgatctcttgacgtcacaatctgtccacctcgccctcccaaagtgctgggatcacagatgtgagccactgcgctcagcccatacttttttaaacaaattttaccaccctcatccacctctttaactggcaaaaagaatacggaattataagtgaaggatcccataaaacacccatttcaaataaaagttccttggatgaatggaagttgtgtctttcttgtttttattcttttttaaaaattaagtagtataatgagagtctttctatggtatgattggatgagtattaatctgcctgtgaaaacaccttctcccttctctgctgttaagttgctgtgttacctaagacaagcaacttaacttctgtgagcctcagtggcgcagagaaagggcaggtgcattaaacgagtctcagagatgcctttcccagtagaatcaggatgaatgagaaggtcttggtcacgatcaagaagactgtttactcatcctttgcacttctaagacatggtgagatagtacaggtgaaaaagacgtggcctggagttaataatgatggtagaagttaagttgaaggggggcagcactgtgcccattggcgactttccttctacgcaccagtgtagatatccatacacaaagcctctgatgaggctccctcgaggtggagaaaaccacaactaattcacttgcgctgggtcagggttgtggtggtccagccttctaattgaagggattccttctaactggtcttgttatgcattctcagaggaggaacctctgagttttaatgaactctggatgtctatgttccagaacattgtcttcttcacagtcaggtgctggcgcagatgtggagcacccggtaggctcagacactggggctgcagtgtgccagctggatcagaagaggctctctctggcgttgtcgtattcttaaagtcggcctgtgtattgtttttgtccttccagctcttcttttaaactctaggcattcctttatagttggcctaattaattttgtcttacaagtaggaagttccctggagtagctttgacactgtcctcttcttttctgaaacagagccatcacattggagaatcagctggtgatcctcgccaccacaaccagtgatgccggggcatactacgtgcaggccgtgaatgagaaaaatggagaaaacaagacaagcccattcattcatttgagcatagcaagtgagttttgaaatcccaaatggtaattctgcaagcaataaaatcttgctttaatcagtaaccactgtctgacaggacattttgcaataaattttctctctctagtgtagtagttacggtttaatattgatccagtgccaatagttcggagagctttagggctcttgctttcttcaaaatgatatgcggaaaaatgtgaatctcagtggtacttctgaatgccagatcttttttgggaattaaaaaaaaaagtatttgctttttatacacagtcaatgcatgttgttcctaacaacaaagaactttcaatttaaatgaattgtatccatgaacctaaatcaggactagattagatatacattatattcttttaatctaacaggaaaatctttgagaaattctacctattaagttgtacgaaaattagcagtatttaagcataatcagttgatcattttttccacctaatttaactgaaagcctgattcttgaagacaatgcacacaaatcatgggtatttgtcgattttatttgaggggactttagtttgagtaaacttagttttacatgtttggactttaaattctactagcaagagttaattgctaaagaagggaaaatcacccaaagcaggaactctgaactaatctagattcagacatccatatcagaaggcttgtcatcagatgtttgcagcatgaagcttcatggtatgaaatgaaattgtcatgcggttgagaaaatagggttgaaactagtcatggcggatggtaaatttcaaaatattattatcatatcatatgagtgaattatattgatttgtttgtatagtagtggattttatctttttaaaaattgtcttgaaggaatcgtttcccctgcaagtgatttgaaaagtatgtggggctaggcatggtagctcacacctgtgatcccagcaatttgggaggccaaggcaggcatattacttgaggtcaagagttcgagaccagcctggtcaacatggtgaaaccctgtctctacaaaaaatgcaaaattagcaggcatggtggtatgcacctgtaattccagctacaggggaggctgaggcaggagagtcacttgaaactaggaggtggaggttgcagtgagctgagatcatgccattacactccagcctgggcagaaagaatgaaattccatctcaaaaagaaaaaaaaaaaaaagaaaagtatgtgggatggagtgatagtatttgcctgacatggccctcgaggggtacaattgccttaggcccagtagaattgcctgggtgaatctttgtagcaaactctgggtgcaggcgtctgtgggagttaactgagtggggtctcagatgcctgcctaattggtcccaagtggccgtgatgtgctgtcatcctgccttgagctccttaatttgaggaattgaatctcgctctgcagaacgtagacttggcacagatttaggatgagtggggtctttgtgatgccatggagaatgatgcacgtggattaggggtggggttcacaaaacccagtgcatgctgtactgtgacgtaaaggagtgtctgcattgagaattacagtagaaatgaggatgatttattaagattttttccaagggttatgataaagaatggaaattgtattatcaaatagattgttattattttaatgattccaaactttacaggtagagccatttatcttgtttagcaaatatgaatctgtactcaattgtaatataactaccaggataataatgagtcaaagggggtgaaattctgcatcagaaacaaggaagttggccttcctctgttagaagaattattccactgaaactgtttaacatcacaaagttataaaacagtccgtacctagtacttgcctacctccctactctgtaagggccagcagaaaataaagcgagtacagtgaatttgcaaaccgctgtactagcgtaataccatggtgttagataattggaatatgtaaatttttttcagtaatttcagtttctaccctgaccgaaaagtatattgaaagctactcataaatattataattaactgggttgcattttgttcctttgtatgtattttttaacttttcattggcaccaggtaaaaatgtgtaaaaagtgagatacaaggcagttgatgatatggacttattttaaatcttaggacaaaacctacattttgttcctttatgaattctttgctttttatgagtgccagataaaatgggagaagtaaggagattgaggaaactgccttattttaattcttaggagaaccttcctggtgacatacgggatttacgtaaatgttaaatggcaaccaattatgcttttttgtttttttgtgttttttttttttgtttttttttctgctaaaagttttattttgaaaacctctaaaagtcagaagtcttgattaatctgcagaatcccccagaattgttttaattgtgcttctttctggcatccagtgagggctctaagcaatgaacactgcagttcaggacctggccaccctgctcctggtgagggtgtgatgtattgaaggatgcgtctcttcaccagatttattatgaaattagatattctcaagacctattgatactgggagtaagatagagtgtgttctgcagacttagatatctttttcttctgatgtaggcttttgtggaaacaccacacaagattgaggaaaatttgtaaaaactttctggccagcgtttctgaaaaatcaaaagatattacagccaattatcatttaatgaagatacatttttgcttgctgtcgggagaataaagcagggaacctttatgtagtgaacaccatcgggatgatcgggtactggtaattaaattcctggtggattgtgctgtaattagtttaaaatcggagtgtcatgcagccccgcctcttgtttgctgttgtggtaataatccgttccttccttgaggacagcaccgtgttagagtggagcggcaaccaggtctagccctgtctcaaaacatctaaataagtgatgcgctgtcacccagctaacaggaggaaataatacattttcatcaacaaccttgtacttgagagttcaaaaacgtcaccccttttcaattgctagatactgtggctacacctgaagcttatgggaagcaaaagatagataggttttagatttaaatttttttttaaagaaagcatgactgttagaactgagatgcagtcccataatggtaccgcctgctgtttagtgcatatttagtagatggcattattatctctcaacatttctcccctcttgcgtggttaagaagataaattccagcatgttctgaaccgatattcctgtagggaaggagaggatttccctgaactctccaccccgctgccctggtgagagcttgctgccatcccaggggtggatccactttgaagttttaatgtgatgtgaagccagcagatgttaaggacataggtgggactgttgaagcatcctgcatgaatttttcatggccagctcccactgctcaggtgcacaccagaaaaagaagggtttgggcctgcctgagagtagatgtgtcttccgaggtcagacccgggaaagctttatgaacctgtcaacctatttttggcttttgctttgaagattttacgttgagttaacctttgtggaacagaacttctgaactgaattactatgtgaataagagtttcttcctctaaaaaaaaaaaaaaaaaaaaaagccacaggcgatgagacgaattctatacagtggttaatcagtcattgtttatacgccattgtacatgccttagacataccatcagttctgatccaatattcaaaatgtccaatgtaatgagattctctactagggatgaagcttggattaaaaagaaatgactgcctctctccttcctgtttttttcacctctttcattttaatgtctcctcttcaaacaacatttgcagataggatatcatttcagctgatcctccttcaggctgacaaacccttgcttttaattctgaagaccacttaacattcttttgtcctctataatgctaatttaactgcagactcacgtagggttagtagttgaaagtggattcctgagaatgtccatgaacagtcatttcagaggactgccctgtaaaacatggcttttgtgtgcccaggtacaactctctcctattttccttgtaccgttaacattaaagggagagaggggaacaggcagatgccttccagatggcctctgacttggctcgggttcctaaaacaataggaactgtttgaaatattactaaaaaccaatctggggcctagccccacatcacaaatgagcaatttagaaccaagcatagttttatagattgtatgacactttactgccagaatttttcagaaacataaataggaagtctattttatagtcaagtcatgagtttaatcatttagccatgcatcgaacctgctgtacggagtgaagtgtgaggcatgctctgccctggcctcctgagctggtgttggacagaactaagtctaggccatggtccctaatgcttttccgtaaacacaccatcaggaaacaagccttgagcatttactccttatgcatgaacacctagttacttatcaattctaagcattaaccatcagacagaagagaggacgggaatcagcagtgctaatcatgaaggttccgttccgtctttacttgacgtctcatggcgcaatatgcactttgtgaatggaaatccatattttacttgattttcttgatacaatctagttttttggaaaaattcttatgacatctggttacagataattgtttcttcttggcgacgtggcttctactaacgacacaagtgttcctgctgccgtttgttgccatctgattgtgctggtgttgtgagtgactcagatctgtgctttcttcccagaaatgccgtcgtcttcagttgtccactttgtgagagttagtttagataaaacgaaatacacaaatacataaatccacctctccgggcaaaggtgaaactgcatcccatgcctatgagggcatcctgtccacttctctgacaatgagaattttcagacccttccttgggatagcttgcgtacagagtgtcacctggggccacctgaccaacagactcaacctgcataataaataacattgaaacttagtttccttcttgggctttcggtgagaaaacataagttaaaatactaggtctaatatttcgtttctgcgccccaaatggatggattggggaatgagttttagaagaggagtgtagctggtggctcccagcaagacttcactcaccacaacaaagaccatcattctctcctcaccccacaaggcaaaaccggatggtttctattgcccactcatgcctccttcaccatatccccatctctttccatcccaaggtgtccccttttcccctgtgtgatttatttcaacctgatttcactgttgttaaatcttaggaaatctaatctgtcttaaatcttaggttaagctatgatcatttgccctcaaagtttgaacacatatgggggaagctcaatatgcccggtttcccaaagcagcagtcactggtctgagtatcactcaggatacatatagatttccaaggcgtaggcaggcatgtaaaatttccaaagaacctattttcagtcctttcatattcacattctaaaactggatctgaggatgcctgaggtcaaattttgcaactgctcctttctttccgaacgagatggaaggctcgtgtcttactcatcctgaatctttaacatgggcaattatctgagggtgtaaatgcccaggtgccaaccaaagggagaattctaaatatcaggggcagaattgagaaagtgaaagactctgataactgagagataaatgattttataaatcaggtgttttcaatcttttgctgtctacaaaacgaggtgggacctacgtgtgttgtcagctgacacttcattacaaataacttgataattactaactgtaacacagtccacttgttctcaggacggaagagatttctagcccctttgcaggtgcagggccatgtcagtggaataaagtgtcactttcaggccatgtgtttaagagccaatgtgttaccttcatgctctccctcccctttggggacaaccatggccaggccacatattgagccacaagatggaagctgtctggatatttgaatcagtacaggggaagaatagcctgggagggccacccaagcagaattggactcgttatgagtaagaaacaaaccttggtatgataagcagtgagatttcagcatttatttgttattagaacaaagcacgtctgtcctaactaatacattactatatgacaacagggcgcattgcctcacgcctgtaatcccagcactttgggaggccaaggtgggcggatcacctgaggtcaggagtttgagaccagcctaactaatatggaaactccatctctattaaaaatacaaaaattataactgggtgtgctggtgggctcctgtaatcccagctactcaggaggctgaggcaggaaaatgaattgaacctgggaagtgaaggctgcagtgagccgagatcactccactgcactccaaccaaggcgacggagcaagactctcaaaaaaacaaaaataataataataaataaataaattactatatgacttttggcatataacttagaaggaatttaaaaaattgagagatattctataacaaaatttcttccattttcatctgttgctttatatgaacgaaattttatctatgaaaaagaaaagattagaattaaactttattcctcatgtcattgagagatgcatttctagttttttaaaatataaaacctattcatcaaaatttgtaatactttaaaaaattaattgaatgtcaataataattgtaacaataactcaatccaagagaaggtttgttttggtttggtttgcccccgagtcatatggttaaaaacatttttttaagaattttttgttcttttttttttttttttgtttttttgacacaaggactctgtcacatggactggagtgcagtagtgagatcatggctcactgcagcctctaacttctgggctcaagcagtcttgctgcctcagccttttgagtagctgggactacaggcatgaaccaccatacctggctaattttttaatttctttttttttgtagagacagtctggctatgttacccaggctggtctcaaacttctggcctcaaataatcctcccaccttggcctcccaaaccactgggattacaggtgtgagctactgaaccccaccaagattgaagtttatacgcatagttttttcagaggctgtgatatgattaatacaattctttgaatcatgtgttttttaaatgggtgatgctgtgtatcaaatgtttagacgtgcttatcaaatatttagattcctttgaatacatatagatgcgctgcggtagttttattaaaatatactgaaatagtaaaacattaaactataccagaaattatgttctttttagtccttcaaatttatgatgaaaaaatggtagatgtcagcttaaaatgtaagaaagatacacagttttacaaaattgttttaggtgatctaggaacaacaactgtttgaagctatatgcagatgtgattataaatcacacatgagagtactgttgatgaccctctaagggcatacagagaggagaaggccctaacatgtcttgagacctgacagatatcgtcacgtatattttccttcttagattccacgacagccctgtgagttaacaatcaactctgtttcaaagctgaggacactgaggctctaagaggttaaattattgacccagatcacaagaatagtcaatgggaagtttgaggattcaagccaaagtttatttgtccccctcccaaaaccctcgtttctccaatgaaagcagaacaacatataccatggaggctgggtgtgctcttgaggtcaaaacgtgtccaagagagaagcccaaggagaaggcaaaacttgggaggaggccatccagcaggaaggctctctgcgaagagctctgtgtgtgcagacctcagaggagcttggttttgttttaaaaaaggaagtcttctgttctgatatcaaaaccactcccgatcaacattcattccagagaacagcagtgtgctgtggctcagcagctttgaggctggcacccttttgcaaccccagtgaggcacgtttgggcggacagcaaacacaggtttggctcaagggtgcagtgggagatgcactggagtcagtgcttactaatggagcatcagaacaataagtcacaatttctgataacaaagtggttgttttgttatcagtaatgcattagacagcacataggacataaagtaagacatgatctgtcccagtggatttatatgactgatgtgcgtgattacactccctaattcccagatattgacatcgaactgttgtggcagattttgcacagtgagtaaacttcacccagggagtaaggcaagcacttggagaattaattcaccaagcagaactgaccagttgggttcagcagacggacgatgagtattcatttacgtctcccaattatgctgcgattattgaaagatacaaattattcagtagtgatttgcctaatcggattttttacaaactcctccacatagctcattgttagtaattcctccaatctaccttcccttctgtccccttgttaaatgtctcaatttaaattattatattcagatatttaagcataagagttctttaattttagcagtttgggggctagaacttaaagtaaccctaattttgttttgttttgttttgtttttggagacagggtcttgctctgtcacccaggctggagtgcagtggcacattcatggctcaccacagtctcaacctcctgggctcaagcgatcctcccaccccagcctcctgattagctgggactgcaggtgtacaccaccacacttggctaatttttaaaaaatttttgtggagacaggatctgcccattgttgcccacgctggtcttgaactcgggctcaaacagtcgtcctgtctcggcctcccaaagtgctgggattacaagagtgagccactgcacctggcctaacaatttttacctttgattttggaacctaatttcttagacttagccagcagcgaatgcctgatttcagtttatagggaattgaagataatttcattgtggaatcatattatgtaaacataacatttcagagtatgtaatatattgagagtgacccaagattataacttatgcattttctttctagctcttatcactctagatgtatagtcattgaagtactttgtctactctccttgtctctgtaattgatatgaaagataaggaatttttggagggcacaaacaagggggatggaaaattgaatttttcctgcagtcattttacaatctctgacatacatccattacacagcttgtctggaaaaatcctaagcaaagtgatggttattggccgagatgagaccacatagaacaagttgctagttgtaaatgtacttttcttagaaaaactgtatttactcagtagttgaatacagcgatgattctggtgaatttcctggggttcagcttttagttactttctagactaaatggttctactcgtaccttcccagtatgatttttccttttacgaatgagttcagtattctgaagctgctaattaagaaacacctgtttaatttcccttccttcagaattcttaaggttttcaaaatccagattgtgtgagttgctaggctaaattgtcttttcatatctcctctttcagaaaaatgaaaatatattattttctgattcaaagggagcacctagagtggtaccaacctcttcaatcataacatggtatttttgctgagtgtaggcctgatatcctatggtttaacttcagtttccaattttaaggacagaaagatgtgatttggttcaaagcataatgaaggcttattgtagtaatagtaacaacagctgttcattggatgtctgctgtatgccctgtatgtaaatatcgtatctcattaaaaaaaaaattaatcacccgggcatgttgactcatgcccagtgctttgggaggctgaggcaggagcattgctcgagcccaggagttcaagaccagtctgggcaacacagggagactctgtctttaacaacaaaaacaaaaaaaacgtgccaggtgtggtagtgcatacctgtggccccagctgctcagaagggtgaggtaggaggatcacttgagccagggaggtcaaggctgcagtgagctgagatcacaccactgtactccagcctgggcaacacagcaagaccctgtctcttaaaataataatataataatcataataaccaccatttaatcatcgtttttaataaacaagaggccataaggtcagtattatcccctttttgcagatgaggtaacaaatcaaagcaacaagttactttcactaatcttatgcagttgattacgtgggttagttttgaacccaggtttgtcttttccccaaagagactttcaccattttacttattgagatgatttatatcgcagaactgtttttgatttttaaaatcatgttgtaatttcttaatctggctgctgctgtagtgaatgcagcctaacgattggtcaccttttggtagcagttcaactccacctttaccacttagtcataatgttttattactgttcattgtaaacgatgttcttttggctcttgtagaaggcaattacagcaggtaattaaaattgtagttctttacaatgtgtttgagaatattaaatcaagcccacagaaaatcaggtaaagtatctgttaaagtgaaaggccacttaacaatgctgaagaccattagcaaatccagagtgctatattccctgcttttccaagaacacttcgtatctgagatgtaaagaaatggaatttatatcagaaataataggaaccagaaatttatctggagatgtagattctttctgtgtgttctaattagtgagttcttcgcaatagtctctctctctgattctttgttatttcaggtaattattctgcctgcacccctttaccttttatgatcttgaagaataccctgtttagcacaaaattagttccttccaatctagtatacctctatgtttggctgagagggtcttaggaaagtataagaaagcctgtgacctctgcttgtcagtgtaaactgttattttgcccaggaataactagcaagtgtagctttttgagacggataccaaagatattattttatgtagttttagagcatcataaaaatgtgagctgggaattccctagctcacctcagtattaggcctgcatgaccatctgggaagtgtgaaggctataacggttttgtggtttttctagggaggaagatacaaatgtcaaaactggaagtgcggaactctagagaagctcttaaaagaatgaaggcttttccattttagttcctaagtcgaacttaaagagtaggagtcagagctgacataagtcagtaatggcgagcatccggctggccccgtgcggtagtttgctgtttcactgatgatgtattttgttgaggtgtgtcccatctgacattaacggccatgtctggtattaaatgcccttctctttctccaacaggatgtcactctgtggttctattaattcagacagggttgaatttcacaaaggcttgctttcatttgggaaagttttcagcacaagtgtactccagaattcaaacttcttcctttctaatccttaaaacattgggatgtaaagaaatggaatttatatcagatttatatatatcagagacttatatcctcattagtcagaatgatgtaggaatagaaaccatatgcataggttgccctttggtgattggttcatttccgaaagcttaaggagtttcatacttcgttagcctactcaagaaaacttcacttgtcttgaactgagaaaatgccacatgcaaaaatggtaccatcatatttgaaaatgtatgaagcgaataggcagtattctgagtcttttgtttctttgttcattttacttacagtgtttgtaaaaaccatgacagcatgttcttgatgaaaatctaggaagcagttctacttgaaccctagcctggcattagatgacctggatcctattcacctcttcagtttgcacttgaaggatggatattaagccatgttgcccccactggcctccattttgattggctagtgaccctgccatgttactacagattttgaatatcatctcaacctggaaggatactgagggatgcatataagagtaaacttattatagagggaaacagctggcatactggcatcagcctacaccattttcaatgtctatgtagaagaaccaagggaagggttgaagtatgattttctttggcttttagagtctctgtctcacttctgtccctaagtgtatgattctccccaactccctgccctttaaacactcagactacagttctgctattccgctcagaaaacgctgagcgtctgatacttatcaggcattacgcttgatgccgaggacacttggtgaatatgacatgtggttcctgccttccctgagctcacttttgccaggagaggctggcgcaccaggaaatgacaggaacacagtgtgttaaatgccacacgaaagggagttgtgtagaagaagcttccgaagcacaggcaagggaacgatgaattctgcttccgatgctggaacagctttgttagcagaactctgaaaatcttttctttcacgtatggagggatgcaccagcagtgagatgattaggaaaagggggttggggtagaacagcactgtctatgaccgggaactgccataaccaccgtcctttcatttgctcccttgttataaatatcagtgccccccaggaagactctgcatttaatacaaccccattccaagagaatccttattgataattgtttttcatcacccactagaacgtaagttccgcgaggatagggatttttgcttatttccgcaagccacgggaagagtgcatgacgagtaataagggctcagtaaatacttgtccagtgagtgcatggaagcctgtgaagtgaggcctttttaccctccctttcctggtcccctctccgtccctggcatctgaggatgctgctcaccggcttgttcttcctgtagctccttttcttttggtgtttattgctccttttggctctcctcgtcccaagatgtgaggattctccagcctttagtcctttggtgcaatgttttcctttgtttttctgcctctcctttttctccttggagatcgcactcaagactcttgagacttcacatatcacagttgatcaaatgttatctctaggcctgaatagcagcctgggcattcaatctttggtaagtataaagtaggacaagtgacttgaaggtcactctgactctaaaattctgatatcttctgatgtttgagcttctttgtctgacttagtaaggtgcccgaagatagaaggcgtgtccacatgcatttcctcaattatcgactcatgtttcttctgttttatgactgcatttgacctgctggttgcgggcgtccctctttgtctcagtcttactcatcaaattaatcatgctgcttctggatacagtggctaaaccttgccctgttgaacctaatatcagggacagtgtgccgtgagatgggctttactacgttgctggacactttcacttggaaattaaattaacctgcctccgtatactttctatcccaaagctattttttctcctaagttccctaggaagtcctctcaccccccttctatgttttcagctcttacctatcctatcctgaactcttagcataagtccctgcttctggaagaatattcatctctctgtccatctgtgcattcagaaatgcattcattaattcattgactcaagatgtatttactgagtgttcactaagcattataggcattgaggatatcatgattgaagcagactggtttctactctcagagcttttgttggtggaatcaaaagacaaacaagcaatttcaatatggattgggatgttctaagtcagggaatagtaattttcccacacatcctgagtttctgccacttacattttcaaacctttgcctgttttaaagacaggattgataaagacacagtaaggtcaagacacacaagattgtaggctgaagaagtgcttccttggaaagacttcacaatagctcttatttatatgagtattggtataggcttatatagagaaaatatgggagatttctcagagatggactgtgttataaatagaacaaatcagtcaaattacagctttcaagccacaggcctcattagtctcatgagcagggccctttgtgggcaaactgaatgagccacgtggaataacactcgtgttcatgttttgcaagctcaacatgtcaaactgtagtgttaaaatgagttgctttacaaatgagctataaatattagttctgcatctccaagccattcaatatgcaattgtgaaaactgatatccttataacttatgtataagtcacatatataacttatacacatatacataacttcaatgtacgagtgagtaaaaagtacggcattagtcagtttgagttgctgtacaagatacccattcattaattcattgactcaagatgtatttactgagtgttcactaagcatcataggcattgaggatatcatgattgaggcagactggtttctactatcagagctttggttggtggaaacaaaagacaaacaagcactttcaatatggtttgggatgttctaagggaacatgtagaagcaacaggctaagattcagaaacatttctctccaaatgggaagttttctaacacaaacacccaacttaagaacaaagaggcaacctctcatccaaaaacatctgcccctcacattgctttcaatatgcaataccttaaaattccacaatgagtattttcccaaaacaaagaatagaccctccacaggaaaactcaagtctcttccttaggagactgggtgacttaaacaacagatgttcattttctcagttctgaaaactggaagtccaagatgaaaccagctttgccagccaggttggtgtctcgttggggcctcccttcctggctcttagagagccacctttccactgatcctcacgtggcctctctgggcattgggggtgcaggaagggaggcgagctttagagagctctggtgtctcttccgcttcttataaggacccctgtcctcttgtgttagagacaccgcatgatctcatttaacctgagtcacttccttaagggccctgtcttcaaatacagtcacaatacaggttagggctttaacatagtaatttttttacagctcagtccataacgacttacacatttcttattcctattgcattttctttcctaaagtacagtatttctctagatcagaagacccgactagacatttgtggcctggatttgctccttgtgttttatttagcccacacaataccttaaaaatacatgagccaatatttaacagctgggagaacattttccagcttctcttaaaatatgtggccatgctaggacccctttccccagtttaaacagtctgtgcattctcctaaggaagagacttgagttttcctgtggagggctctattctttgttttgggaaaatactcactgtggaatcttaagatattgcattttgaaagcaactctaggggcagatgtttttggatgagaggttgcctcttcgttcttgaggtaagttgggtgtttgtgttagaaaacttcccatttggagagaaatgtttctgaatcttggcctgttgcttctacattagctggctctggaagcatttgaggtatgacccatgatccaataggagttgctgtgatgatggaaatgttctctatttttacatggagctattgaatacttgaaatgttactgttgtgactgaggaagtgaatttataatttaatttaaacttttttattttggtaacctcatgtggctggatgctactgtattgagcaggacagttttataaaaatgcatagcattttgcatacaaaagggattcctagtcaaactggccacatgacccatcattgagctttattcgctcctggagtgatctaacagtggtaagagcttgtcctgaccaggaagacttggactcccaggtccccttgagagcccttgcacatatgagcaggatacctccctgtattttgtatactgaagatccatggttggggagccctgtgtgctgggagacactcccttagcaagtatagccgcttagtcatttgccaggctgttgcattgcatgcattcatggtctatagtagtctgtattaatgagaccccgaagagatggttggtacatagcctgcatggctgtacacagcaatccggattaattcatcagttatgcccggtgccaggcacggaagttagggaagtcaagggtgagatggtcatctagatgggtgactaaagcgaaagtacctgagccacggttgagagaagcacagtttgctctggaaaacccagcatggggcacccagacacatcagtgggaattggaaggtttcccctgagagacgatgtttaactgagacctaaaggttgagtaagaggcagtcagctgaggcattgggaagaggtcatcctggcaaaggggagcacaaggctggagtcagcaggtgcctctctgttcacagacttgcagctcacctgctactgtagatagaaacaaagccctgcttggcagagggtgcaaacagaactgtctatgaccagcctctggaagttcagggttccacataaacactgatggtccggtgttgccagcccccgtccctgaacacagcgatctgagggagctgatgggatgctgctctcaactggggcatcacctcatcctgctcaggtctcagcagttccaagctgtgtccctcactaggagaccatgcagtgggtgtcgatcaaaatgtttgcactcttgtctttcttatagtagagaaatcctttaatataaccaagtctctatcaaaaacagggaaatataagttagacaatgaaggaggagagtgtctctgactgccccatcaagttattgatgttacctatctgctcgggccctgaaggcattcgtttgggcagaggcacgtcctgtctgctccctacaaatagatggtgttcatctagagcagggatcttcacgtcaggcctcagtgactccaggggatattcagcagtggatggttctcagggaatccacatcctccatttccatgtgtactctttcctgggatggatccgcctgagaacacgcctggggtcttccctctcagctgtcctttcacgcttgcttttctccctccttgcaagggaaaggcattcctcccagcaaaccctcctcttccttgttgcattgctctggcctgtagaaccctttgctttccagacagaggagaatttcaaacattagggtcggtattgagaaagtggatggctttaataagtgggtaagaaatccccttgcgagccagagagcttagaattcttggttttcaagagaattgaaggtgaacccaatcaagttgtcagccaatagatcattaaaaataatgtttgatgataaatcactgagtgacgatgggcataacagaatgctgtcgaggaattgggtgaaattgttaaaactgttaaaactccttccttcccatctgtttatttatgaaaataagttttctccatgcatacatttataaaaacaaaaaaatagaaataaaattgatgctgaacactttttcaatttacctagaagtaatatccatccatgaatatatgaactaattaaaaaaagaacattcccatttatctcattgagatgtatttccagtaaattttacttttcttattcaataattatttgtcacaatgtataatgatgtgtgatggtttgattaattgtgaatagcaattatgatggataatcaaaccagtttttttaacatttagttttagagtcacaggaaattttaaaaattattgtaatatctgtctttttgctataaagaagtgtagtacagtgataaagctttcaagcttaatatatattacatcaaataaaactctgaattgaaggagaagaaggaatgatgtaaaatttgcagttgttaaaaaggagatttttaaatggtcattggtaggtatcaaatcaaagtggtctctgggtccctccgtatgatagaaaagagtgacctaaaattttacagtacactagaaattaaaacacttaaatgtaaacttaaaatatgtgagagggacatcgtttttcaaaatttttatggagtacctgggcaaaaatatctgaaggccatgttcagtgaaagtggtaataagaggcatatgcgtaattttaaaccaaaagttgaaacagagtgggaggagcggaagaggagggggagaagagaacatgttgggccaatatatttaacaataatcatcaagaaataggaaaagacaaaacaaaaatcttttaaatatctaacactgttttttctaatgctacatgcccatgaaaatcacctgggctgggtcaggactttgttttagtcctcaggtgattttaatacacagccagggttgtgaattatcggactaaactcacagagtggtccttgggctagtactatcagcatcatcctgggaacttgttagaaatgcagaatttggggctccatgtcagccctcctgaatcaaatcctgcatcttaacaagatatttaggtgattcatatgcacgttaaagttttaaaaaaccaagatttccaacaagctcccaggtgatgctgatactgcggttcacggacaactctggtcacggactacgctgggtagcagagttctcgagttgtgctactcagaaggtttatggcagagctactcgcagtatgatccgagaatcgcgagcctcgcctgacttggattcacattagacatgaaaagtcttaggacccatgccagacctagggatcgggacctctgggagtggggtccaggaatctgtgttttatcaagctctccctcactaaaatttgagaaggaccaccctagagagaatccacatcgacttcagatggctctgagcctccagttaatttagggagtggctggggatgtgttattaccaagaggccccacttcatgagagagctgctgcatgtgatgagctccctcatcacagcctcacttgtctccaatcccagggatgcccgttttgcagtgggtctcgaatgtgtgaccagttttacacaggagtgagctgacggtgccttgcctctttcctcgtaccacatgcatgtacagcccttgggcactgcacctacccatgtatcaggtgatccagaaggctgttagtgttgaggggggccgagacccagagagggctgtcaggtggatccaaggacaacttcgcagctgtttgcattgtttgatccagcagaacggatggtgctggaggcatcctttggataatgattctgtgtgagtcagtgcaagccccgttgcagagttgcagctcagggcccaggagttctggagcaaaaccatttgcttggcagcacagaactgcgtattatttgagaaggactaacatcttgcgctaatgagtttctgggccccagtagacactgagctccaggtggctagaaccagaactgcccaccttaggtcaagtattatcagattatttttttctctttttctttttttttttgagacggagttttgctctgtcacccaggctagagtgcagtggcgcaatctcggctcactgcaaccttcgcctcctgggttcaagcgattcttctcagcctcccaagtagctgggattataggtgcccgccaccatgcctggctaatttttgtattcttaatagagatggggtttcactatgttggtcaggctggtctcgaactcctgacctcaggtgatccacctacctcagcctcccaaagtgctggaattgcaagagtgagccactgcaccaggtgttatcagattctccaagtcataaggatggccagatgcaagaccgacccattgggtggtggaaataaagaagcaaattacatgacaggtggcctcagactactctgatgtcacccacctctttagtactgacacctctcctccacctccatggctgtagcctcaggggtaagggatccttttaaccagctggcaggaaactaaaaacttgggactaactcacagatgggtcagaatgacatgttggtggcagctaaaaatgtagttgttcaatactgtccttcccagggctggcctgaatcaccaggggtaatggaagtcccttcagtgggcagagatgtgagcagtacttgcaccaccatccccactggcccagttgtggagttatccttcctctccccagaccttaagctctgctgtgttagagtcctgcatcccgggagatgatgcctccactggagaatacccaagggtgccctggaccaacagtcaaagaagtcaccgtactggcctgggtactgggtcactgtgctggtatgggtagtggatcactgtattggcatgggtactgggtcactgtgctggcgtgggtactgggtcactgtactggcatgggtactaggtcgctgtactggcatggtgaattggtgccagtgaccacgaggtgcctgggttgctgctatacagtggagcagaagaaatctgtctggaacccaggtgactcgccaggtgtcccatggtgctcccacactggtatactgtcagtggacagttgtgacgaacaatcgtgagtccactaaacactttaagaagggtctggggtaccatgacaccagcaccctagaccagctaaaatgctggctaagagtgggagggttgtgctccttttctccctcacttcttcttcacgggaattccgcttcctgataatgctgaacccaggctagggcagagctatctgaatctgtagagcaaagagaagacagtgtctccacagagtcaagacatttactatgacatctgtggctccagcgttcaccacaatggtctctttaggaaaggattcccagaagaacatgtatcggccaaggagaagacggtggctcaacgcacattctcatttggcgaaagtgcattgaacaactgcctaacgcccgtcagtccgtctggacttaggaaaacccatgtgtaatgaagagcctgtggccgcttagcattagaggaatgtcagcggctcagggcagcacagctctttctcggggccctgatttatggaaccctgggctttgctgaactcacaggcatggacaccaatcttaagctgtagcatgaagcctcgtggtaactcaaaagggaaaacaagaaccactttcctcaactgtttgtaaacttatattagcttcagaattctgcataacgtagactcacatggctttgtctatgtgagtgggatttgaagccaagttgaatctcctggcttcggattctctattttgtaactgcagatgggatatgatttattaactttgtcgctagctatttgaaaaaggagctcttactatggagaagaaattgttacattcctatcacccgcaaaataggacttgactctttcttcctcaaattaactaaagtcaacctgttttcaattggtgatattccttcattagttttaattcatttttcagcacacctgattttttaattcattatgcttttgatggaaattaattagtttcttttagatctaaaacaatattattgtgggcactcagacattgttacacaaaagggccttattatgaagctggtctcagaatgaaagcctgggtctgtttcataggaaactcgcctgacgatgaagccatcgggacgctgaggctttttggctgcctggttctgagcctcagttttcccatctgtgaaatgaggagcttgagccagatgaactctaaacttttgtttgatgagcacaacaaaatgaaataaaatcttataaaatagatatatgaagatgtatatgaaggtttatggtaatattatgttgatcaaacattttcttagcccaatagagaatgaaaattaatatcctactacaactttgcagaaatcctatttatttatttattagacagagtctcaccgtgttgcccaggctggagtacagtggtgtgatctctactcactgcaacctccacctcccgggttcaagtgattctcctgcctcagcttctcaagtagctgggattacaggtgctcaccaccatgcccagctgatttttgtatttttagttgaggtggaatttcaccacgttggccagactggtcttgagctcctgacctcaggtgatctgcccacctcagcctcccaaaatgctgggattacaggccatgagccaccgcccctggcccagtttaataattttagaccgtattgccaattatttaaaggagaagggtgagtttgtatttctttaattaggtttaggtaacggcctagggaaaacgggaattgcttacacagacaggtgaggaggagagtactccatcagacccaccctaaattgaattaagactcaggacccttgatgtgctcagctggatgggccttggatgtgctagcctggctcccagggaactgtcgagctgggcacccacagtgttgctcatctgccccagatggacaactgcctgtaatttaatgtcttttccaacagggagctatgaaactgaattttactacaccaaagaaaaacccgcttccctaactataatttcaacaaggaagagtttacacagaaaaatcccatttaaaaagtgccacttaatgtaatacagacagcagctctccagcccgagtgccacacagagaacctcactgtttgcccaaggccttggagacagaagtcagacctgtgagcctctcgtgctgctgattcagcctgattaaacaagagccctaatttttatcaaatgtgcagtttggtattcacaatcctttatgagtagaacctcctgaattaatcaaacgactggttaccaaataaaatttttttcaagaaaagagcttatgacatcatactttattagctaggatgtatgtttcatcagaacatctgtcatcacacaagagacagagaatggactacctgaaaaatctacgcttaactacctggagcagagaggcaaagtgggtcagctgcccaaaggtgcagcttcggagagcggaggtcgcgagagccaggttggcggggagggatgctgggtggtgaggctgggccacttcagcctggagggtgagggcagagccaaaatcttaattgtaggttgttaaccaaacccattgaaagagaggccaggtgcggtggctcacaccttcccagcactttgagaagcccaggtgggtggatcacaaggtcaggagttcaagactagcctgaccagcatggggaaaccctgtctctactaaaaatacaaaacttagctgggcgtggtggtgcatgcctgtaatcccagctacttaggaggcagaggcaggagaatcgcttgaacccgggtggcagaggttgcagtgagccgagatcgcgccactgcactccagcctggtgacagagtgagactccgtctcaaaaaaaaaaaaaaaaaaaaaaaaggccctagagaaaagagcaagatgtggagtggccaggcctgaaatttgggtacgttaggcaggccagcgagactggaaaccaggtaacaaaagtgccctaaaagccactcttggctcagggtctcttcagcagtgggctccctttagcattcagagagaattctctccacgtgcttctccttttttttttttttaaacaaatgcagcctagtcaattaaaaagaaattccatttgcagtgtttatttaacactgaacaggttgcttgctgtatgaaaccaaaataataaaagtaaaataaaatttgagtgaataaattactggtacatttagaaagcggatgaattggcagcataaacagattgaaactgtggtttctagaataaattcagtagaaatgaaatttgatttgagctgctctgctacctacaactttgcagaaatcccatttaataattttagaccgtattcccaattatttgatgcagaagggtgagtttgtatttcttgataacacatatgtatttctgtttgaagtaaatgagagtaacttgcacataccagaaggaaagtgcgtcccaggaattttattaactatatgtttaggttgctgagaaatgacattctctcttaatttcatgaactgagtagtaaaagagctcactggggatgtgtgcccaacacatgcatgtacacacacacacaggcaaggaaaaatgtgctggcatatccttttgggtatgcagttaatatactgtttaaagggatctcaataaagatttcctataaattatgtttattgcatgaaaataagtagagtctaaggtgtgcattctaaatgtgcttggggaattccagcctttgattttaaaaggagaaggacatttgtttaaggaatttgattatctactgataggtcatttctgaaaagaatatggcacattcatcttggatcccagtggaggctttactgcggactgccttccccaaggccctgctccctgcacacctcactctcaacagcctcctggttctttgcgaaaaggaagccatccaccactctataaatcctctctaaacatatgtatgtggactcattcttatttacctccctcctgtcctaaagagtattactgcttccgttgaaggctaaaatttcccccacttctctgaactcatcttttccacaagcttggctctgttcttgcctttatctggaaccctgtgagcacactcagcacatttcctagacagccgtgtctttacccctggttcctatcaggagatccccttctcctcccgctacgaggggcagcagcagccctctcccctctccacgaccctctttagtctggctgctgcttgtcaggtccgcactggaactgcccccagcaggtgaaaggtgacctgtccatctccacctgtagaggtctatgttggtcctcatcaccttggccctactgcgcggctggctgtccccagtgccaccccagtgttctcaggttttctagtctctgacagctgccgcttagtgtaatcacgcttctttttttttttgctttcccattaagcattgttcttgtggagagctgcaatgcctccagctcttctctgttcatgcctctcacgtacacctgaaacctccaaaccctgcctttgcgatttcaacctttactcctggaactcacatgtgtgccctgctgtctagatgccccatggactcctcgatgtaccatcgacttcatcaagttcattatttcttgcccagaccagttcctctgtcactatcgacttggtcgccataaacctagaaatcctgggatggtcttaaattctttccttcttccattaaatggccagattttcctgattctatttctaaaaataattgtaatttatttagtatttaccgaggcctttaacaagctatgctgaggcagctgtctgacagaggagactccttatggccatggccacaagagtagtaagtgacagaaggaggattggaagcaagcgtgtgggattgcaaagccggccttcctcctcttgcctgcttctcacgctggtctttgttgacgctgtcatgctctcattatctctcactggattaatgctctcagatgtttttgctactgtttatcctaaaggaatttttgaaagccgtgtgtccccttgcacattttaaaaaggatattaaattcattttgtacctgcaaatagttgcaaggaatatttactgtaagtaatcacattttaaaacaaaaccatgacatcattcttctgaatggagcaactagaatatcccttagatgacaccattttctatttcaaaagtatgtggaaaacattttctttgacagttggaggtggtgctgatacactattgcactccgctgcacccctcccagaattagaccctaatataatgttcttttatgcttgaaaaacagttattaatcatactatcgtactttcctgcaacatacgtatcacatctacccatacacacatgtgcatatgtgcacaagcacatacacatacaaaccgtatttgaaatgtgcttatttccagtgaccataaacttaaaaaacaaattccatctcgagctgttatgatgatagttcttatgacacagttgatcaggattctataatatattacaaacttcataaataattattaaacctataaaatgttaattggaaacgcatctcttaacgagatggattcaggggcatttatgttttggggtcctgatgaaaggaattccagttgttcctttgttttggtacccagaaggatgttattttaaaaatcccttatcggaactctccaagcatcttcagcacttttcctgacagtcctgtcttccttacgtccttcagatgcaggatgacaggagccttctcttgttaaagtaggaggagggtgatcgtgaaagggaagttgagagggagtagctggagtcaggcaggcttcttgagcaggcagctttcagaaggaggacgcatggaaggtggatatctactaatagaagttgattcccttaaaactgcctgtgtttgaaaagttcatagagtacacacttagccccaggggaacagggaacatagaagaccaccacccaggccacgttctgcaatgactatagagttgtcttttcttttttttttttctgagacagtgtattgctcttgtcactcaggctggagtgcagtggcgcgatcacggctcactgcaacctccgcctcccgagttcaagcaattctcctgcctcagcttcccgagtagctgggattacaggcgtgcgtcaccatgcctagcaaatttttgtatttttagtagagacagggtttcgccatgttgaccaggctggtctcgaactcctgaccttatgatccgcccacctcggcctcccaaagtgccgggattacaggcgtgagccgccgcgcccggcctggagttttcttttctaaatatgccacttctcttcttccggacccccttgaggcccagcgcatcagatcttcacttcctggcctggtatttaagacttttcatacccgtcctttctctgtttagagtttccatttgccgtccgaactttccctttcaaaggtttccttttctctccaaatgaatgcacccctcctctgctggactgttcttgaacaaatcccctggcctggaatgcgcttgtactacatgtcttcaggatgctccagcatcatgtcttccccggagatgcacccactcctggctcattcactctttatcttcaccactcagcgttgctgctcctgccctgcctgctgaggtctgagctcctttcctggcaacactcccctttcgaccttgtatccttgagtagtgcaaagcccaggacacagagtttagaatggaatttgtatagtttctaatggcaagaaattagacttcctggacatttgtgggaacatggatttattagtctttaggaaggtaatttttaaggaaaatttgtttaaccacttcagtatatgttcaatggttgagagggtaatttttgacttcagagaatattacaaggaaataccatgaatttggaagatcctgtgagccttattctgactagtgaatttcaatttagagcaggccagagaattcattttgatggatgattcttagagggcggcgtattttgataatagattggaatgttgctgatagctggccattgcctgtgttacaacaagtagtcttttagttagcaggatcatttgtttattttcttgttactgtacctatctgtgtaacttaggtctttcttaaaaaagctgttccaaagctcacgtggagagtttgtgatagaagagttgacagacctttagttatgaaggcagtgcttggcctcacaataaaatattagcttggctggagagagaattcagaagtttggaagaataatatgtattttcataagtcgaaatgaccaatcattcacaagttgagaaaggacttaaggctcagtagagtttcttggagttatgtaacatcagtcaaaacttggaggatgtaggcttctatacttacaaggtattttcttccacattgctgtcctgtgacaaaagccaggtaggagaatgaagagcacctgccctgggaatggacccaccccccttcgagtctggccctgccactcatcaggcacatggctttggcaagctaagaagccttcttctctgcatccaatcctcatctgtcaaaggggacagcaatgctatgtatctcatgagaacatttaaagtactaagtaaatatatggaaagcatgtgtaacgttgcttggcatggagtaaggggtgacttattttactcttttctggaatgaaaataagatgccttttacactgttggtgggactgtaaactagttcagccattgtggaagacaatgcggcgatccctcaaggatctagaactagaaataccatttgacctagctatcccattactgggtatatacccaaatgattataaatcatgctgctataaagacacatgcacacgtatgtttattgcagcactattcacaatagcaaagacttggaaccaacccaaatgtccatcagtgatagactgcattaagaaaatgtggcacatatacaccatggaatactatgcggccataaaaaaggatgcgttcatgtcttttgtagggacatggatgaagctggaaaccatcattctcagcaaactatcgcaagaacaaaaaaaccaaacaccgcatgttctcactcataggtgggaattgaacaatgagaacacttggacacaggaaggggaacatcacacaccggggcctgttgtggggtagggggaggggggagggaaagaattaagagatatacctaatgtaaatgacgacttaataggtgcagaacaccaacatggcacatgtatacatatgtaacaaacctgcacgttgtgcaagtgtaccctagaacttaaagtataacaaaaaaaaaagaagacaccttttattatttctaagcatcctctgagttcttgaccaaacctgatggtgcaactaaataaaccccgtgcatgcatgattagtaattcaaaattataccctacgtgttggcattttcacttgttggagtgaaaattatcattttattaaaattcacttaaagcttgttgaaagcaggcagagatgctatctgccccaaataataagcttttagagacaatgtctttcttgaagacatgatatagtcttttttaattgaattatttggcgttattaacattttaatgaaggaattattctattttcatatttcttagaaactaatatttaatttcctttttatgttaataatataagtatttagcatatttaaaatctcagttaaaactaatttatacttatattttcataaagatagaagcgtaatatgcttctttgcattgcgtgtttatgttcttgctttgtccaagttttcccttttccttagctatattttgaaaataccagtctcaagggaataataattgagatcagtaatatcttggatgaaaaagcttgccaatcatgccggtgttatgaggatgtgtatttttaagaggagacttactaagtaagattcactggcattgggcggcttgatatatgtgatttatgggaacacctttcagtaattttacacagtccaccagaaaaccttcctcataggtagaaatgaggttgaacccagaagaaacggcctttggaaaagaattggacattgaagctaagcggctaaatagcttcagacatccctagaggaagaaaaataagatttaaagtgttattattaaagaatatgatctataaataaaatggtatattctcatacccctgacagattttgacaaataagagaaaaatgtgtgcttaataggaaaaatgtgtttgaagtatgttttacactatttaatgccgctggtgcactgagaggttgctggtggacttgatgttgagttaatcttggtgaacaaatagagaaggaaggattgcttggcgctggaggtctgctttgtgcagagcagctttgttgacagtcaaattagaggaccggcctcagtgccagttctcagcacctcgcggataatgagctttggacgagagtgtgggtctaggcttttttttttttttaacttgagattctttaaatcattttgaaattttgattttaaaaatagttctggctaatattccgtagaagtatagaaaactggccagccgagagcgacggatggcaccaggcctttgaagggtagcttgtgtgtttggaagatatgtgctgcattgctgtgggtaccgtgctgtcactagccatcaccactgccaacacatcagtttcacgagtcttgcaaaaaatgagatttaaaagtttatttaaatctcatttatttaaaagtttttttttggccgggcacggtggctcacacctgtaatcccagcactttgggaggccgaggcgggcggatcacgaggtcaggagattgagaccatcctggctaacacggtgaaaccccgtctctactaaaaaatacaaaaaaaaattagccgggcttggtggcgggcacctgtagtcccagctactcgggaggctgaggcaggagaatggcgggaacccgggaggcagaggttgcagtgagccgagatcgcgccactgcactccagcctgggagacagagcaagactccgtctcaaaaaaaaaaaaaaaaaaaaaaaaaatttttttccttgaaatttgcttttaaaaacatgccatttcaggaaagaaaaatatgtttctttattctttaaattcttaaattccatgtacttttgccataatagtcacccacccccagagtttttctgagagaatcatctcatatgggtgcagaatgttaccttatggtcaaactaattagctctgttttcctacctgaccgtgtggataagggagcatttgtcatttggatgatgctcagtgtatatagtcatccctccattccaggacccctgcatgaaccaaaacccacacgtgggaaaagttagttctccacgtacgcaggcttcacatcctgtgaatactgtattttcaatccacacttggttgaaaaaaaaaaatgtgcatagaaatggacccatattgtttaagggtcatctgtacattgactttccattgcaaagatggaaagtaacctattgctcagcctcgacttggacatggtttgtagtcctaagtggattctggagttcatttagtaaacaattttggagggcatctattaagtaccagctgctggcaatatagccataaacataactgtcctcaaggatgtcacaatccaatctggcctgtgttttaaaattattgtgtgtgtgtgtgtatgtgtttaatcaagtgattttaatattaaaaactctgttagaaaattttataattaaattttatatatatgcatttgtatgcattaaaataagagttgtatatcccttattcaaaattcttgggaccagaagtgtttccagtctcagatttttttggattttggaatatttgcagaatacataccagttgagcacccctaatctggaaatccaaaatcccaaatctgagatgccccagtgagctttcctttgagcatcacgttggtgctcaaaaagctttggattttggtctggcacagtggctcaggtctgtaatcccagcactctgggaggctgaggtgggcaattcacgaggtcaagacattgagaccatcctggccaacatggtgaaacctcctctctactaaaaatacaaaaattagctaggcttggtggcgcacccctgtagtcccagctactcgagaagctgaggcaggagaattgcttgaactcgagaggcaaatgttggagtgagccgagattgcaccactgcactccagcctgtcaacagagcaagactccgtctcaaaaaaaaaattttttttggatttcagagcattttttgatttttagattagggatgctcaacctgtatttttttaaaatgctttacacatttttaaatttgagagtatggaataggggttataacttctagagacaggatacttgagaaggatattatagatcttactttcttagaaaacttttaggagccaaaggttatgtacggtgtggtagaggaaccatagaggttttgaaatcatctgacttcagttcatatctcaactctgttccttcctagttttgtgactgagagaagactacctaagctctgcagaccttagatgccttatctgaaaatataaataattaatgtaacaatacataccttatagagtatgtgtgcagattaaatcagataatgtaactcctgcaacacagtagatgcttgctaaatgttaatgattgccccctgtctcatttccttacctgaaatctcaatactaattactggtgtttgttgttgagtgctaaaggtgatctgattagtatagggtcacagagcaaccatattccgtaatgccaacacgaagatctttcaatgagaatgaaatgcaatttttatatttttattcatgaaattttagagtcacataactacacttgaatgcctttgttcatgagaaaacatagaagtgacaatttagtatttctctgcaatatcttctgtaaacattgaaagaatatttgagggattttcgatcagatgtcagactgaagtaccttctgcagccactccttctcactccaaataatagaaacaacaaaaaagataggtacatagataacagaaaagatgggaagggatgtattatgaggaatcgctatagagaacagacaaagttggattgaaaagaaacctacaaaagatgggacgaacactagagttaggagacactgagagcagggtggacccaggtgcacatgcagggtggctcagtgaactctaactgcttcatctacagtgtcctccagaccctgtacgtcctaatccagccctgctgtggccacagatttgcctgcccacttgtgacagctatcagtatcaggacttaggcctaagagagaggtcacttttctagtgagctgggaggacagaagagcccttcactcccagaagatgatctagataagatcctcaagagcacatccaggtccttctctcactgcaggggatagacacagcagatattcttacctggaatctcaaatagaaagatgagcaccacaccaagaatcactagacagctggggaatgacaacaccatgaaagagagacacccactcaacaaaaaatacttatgcaaggaaatgctgaatagaacaagcagaagagaactacagaaaaggtacatttactattttaggagaggtgcaagaacatattgcatccattagaaatggatgaacctgtaaattaaacattgattgttgcaataaaaattaaacaggctgaagacaaaagtgaattcaacttgagaacaagcttagaaattctcctaggatgtatcaacagaagactaggagaaataatgtatgtaaaaaaaagttaatggacatagaagatagagccagcagtgccaatattcatcaaatgacaggagtttcataataagggaatgtgggggaggtaatgtacaaagaagccctaggcaattttccatagctgcagaaaggcaaagaggccattaggtgccaataaaagagaaacaaacaaaaaacttacaacacaatatactaaaagatcctggggtggatgtggaggctcttttagtcaaagttctgaggggaaaacttaagaatgtggaaatctgtgctgcctttcaagggtcaaaatgaagtgaagactataagactttttcagacattcacagtctctaaagcttcaattaatgaatggtgaaagaattaataaatgatgtactccagcagtaaaaaagctgcataaaaatgaataataaagaatttactgaaacttactgttaaatctaaatgtttattattgatagcattaatacagaactaacattccaagagttatcaaccagagattttggaagactggggagaagagagatgtggagtaagggaggaataaagaaaatgcatactaattttcttatcttgctcaagggaaggatatgcttattgattcagtctagatacaaggaaaaagtaagtttctgtaaatgttaaaaatttaagggtagctagtagaagaatagaaactgaattcatgacttccaaactactggagaaaaaaataatgtaaatctgatcaagaaaatatatgaaaagagggtttaaaaaatgaaacaacctagaattttggcaaaataagtgcataaaatatcaggtagttcaaatagattaataatctcagtaaatgtgactaattttgactaacaagactaacttcaacccaactctaaaggacagagcctttcaggtaatgttaaaaaaaaaaaaaaaaaaaaagcagctggccgggcatggtggctcacgcttgcaatcccagtactttgggaggccgaggcaggtggatcacctgagatcaggagttcaagaccagcctggccaacatggtgaaaccccatgtctcctaaaagtacaaaaattagccaggcatggtggcgggcacctgtaatcccagctagtcaggaggctgaggcaggagtgtcgcttgaacatgggaggcggagattgcagtgagccgagatcacaccactgcactctagcctgggcaacaagagcgaaactccacctcgaaaaacagctatgttatatgctacttataggatataaattttttaattgcatagtatgaaaacatgtcaaacattaaccatgttgattaggttgagcaacattaatataagaaaacttagaattcaaggtaaacagtgttaaaagggacaaagagggatatttcctgctgaaaaggaaggctctaccaagaaattacaaggcataatcagtataccataaccaagtagattgaatccccgaaaatgtaaggatggttcagaattacactatgaaaaaatcaactcctattaactgaaaaaaattactcttagtcacctgggtatagagggaaaacttatctaaatagaggaaatctaacaaaaatctactggaaacaacatactgataaattattagaagcattaagtttgaagtctgaatctggggaaagatgtctactattaacattgtactcaggacacagtcagtgcagcaggacaaaatggaaggggaaggaggaggagaaaggggaaaaagaaactgaaaagaaaaaggtatagatattagaaaaagagcaaactgtcattatttcaggcaatatgattacttgcgtagaaaacctaagacaggctgggtgtgacggctcacacctgtaatcccagcactttgggaggacatggcagggggattgtttgtgcccaggagttcaagaccagccttggcaacatggtgagaccccatttctacaaaaaataataaaagaaattaaccacgtgtggtggtgcatgcctgtagttccagcttcttgagaggttgaggtgggaggattgcttgaggccagaaggtcaaggctgcagtgatctatgatggcaccactgcactccagcctggccgacagagtaagaccctgtctcaaaaaaaaaaaatgaaagaaaacctaagataataaactgaatattaggattaatgagagttctgaagggtggctagatagaagatagatatggaaaaattctttttcctgttcatcaggaataagagaaatttaatagaaatacagtaaaataggaacataccattcactgtagcaagcaaagctattaaatatttttgaataaactgatcaagaaatagttaagaatctatagaactttaatgacgatttttaaaaggaacaaatagtgtgatataccatatacatggatggaaagactcaattatgtaaagttgtcacctctccccaaatctataaattcggtaaatcatgaaacttgtcaagatgattctgaagttaatatggaagccttaataatgaatggtttaaaccatagtatattcatgctatggaatacaatggattagttaaggataatgaggtaaatttgtacatatgagaatggctacacctccaagatacgtttttgtgtggtgaaaagagaaaattgctaaacagtacatataatatgatatcatttttttaaaaaaacacaaaagataagtcaggcaccgtggcacatgcctgtaatcccagctactcaggaggctaagagcgggaggattgctgagcccaggagttcaaaaccaccctgggccacatagtgagaccccatctcaaaaaaacaaaactgcaaaacaatactttatatattttattactacatgtatatacatctaagtgaattcaaaaaatacccaggaaaaaaaaatcacaagaagcttaacttcctttctggaaaggaaggatgaagactgaatgtagaaaaattttcaaaagggtatttgacccacctttccaagtcgtctatgtctgctttgtgtataagacccagggttttttgttgttgtgtagcagggggaatagggaatggtatatctgtaccatccttctaggaagcacaagtcccagtacaagctttaaaagtaagcaaaaaacgaaggaagaatttccctatcaggtgtcaaagtgtattgcaaacatcaactaataaatttgtgatactagaataagaatgagcaatagtgttgtttttggttatctagtataacagttgtcccaaaatttagttgtctaaaaccttgtatttttcttttttcttttttttttttttgagatagagtctcactctgtcacccaggctggagtgcagtggcgtgatctcggctcgctgcaagctccacccaccaggtccacggcattctcctgcctcagcctcccgagtagctgggaccacaggcgcccgccaccatgcccggctaattttttgtatttttagtagagacggggtttcactgtgttagccaggatggtctcgaactcctgacctcgtgatccgcccgcctcggcctcccaaagtgctgggattacaggcgtgagccaccaagcccggcccatatttttcttttgctcaagattttgtgggtcatgaattggaaaagggctcggcaggtgatggttgggggctcaactttgatccacctgcctagctgggaggctgggctggaggtctccttccaaggtagctcctcctggggggcctttgctcatggcttgaggctgtcattgcatgatggcatcagggtagttgcagttcttccatagtgaaatccacttatcaggcactttgaacttcagtaacagaaaacctcaactcacgctggttttggtttttttttcagtaaggtaattaaaagcaggctgtaggtgcccactgtggctcatgatgttgtaaagacctgagttttttctgtctttctgctctaccattctcagcattggcttcatcccaaaccaagatggcagctggcagcagtttggacatggtgcatcctgttacattatcaacagacaaagaaagtcaccccataaaaattccttctcttttgtcttataaggccaacttccattaccatccccaggggacagccagatgctcattggctgaaagtgattttcaggggttaagtcaacactgagttaccacactgcccaccacacctgtgtcactcacgtcacacttctccagatccattgcaaataggtgaaacatatacatgcaaaatacaaaactgtacatccttagaaaataatgacgtgtggggaagatcttttttaagaaacaaagttttaaagcaacaaaagaactgatagaaattttttttttttttgagacggagtcttactctgtcgcccaggctagagtgcagtggcatgatcttggctcactgcaagctccacctcccaggttcacgccattctcctgcctcagcctcccgagtagctgggactacaggtgcctgccaccactcctggctaagttttttgtatttttagtagggtcggggtttcaccaagttagccaggatggtctcactctcctgacctcgtgatccgcctgcctcagcctcccagagtgatagaaatattttattgcatcaaaatttaaaacctctatgtaacaaaggccctataacaaaattgagacaaaagacagactggaagaaaacatttgcaacatagtcaatctacaaagtctttttagaggtaatcactcgaaaaaagacaatgaaaaaaagatgggcaaaggatttgacaagaaggttgataggtgatgaatacatattgccagtaaatgcatgaaaagatggtcaagttgacttttcatctaggaaatccaaattaaggcaaactataaattttcactcaagttgtcaaacatttaagaagtttgataatatcaagtgttgagcagggtaaaaggataatggaattttcaaaatgcaattgatgtgtaaattaatacagccatttttgggagcaatttggtgatatctattgagaaaataacttttatttgagggatgtgagtccttttaaattatcaggcccagagagacattaaaatgacgtagcagtcatctcctcctctccccttggaggcctgtattcatctcttgaaactgctattttttgccacaagtagctataaattaacttgataatgccgcacctgacactgtaacccacaccctatagtttaacaatatgcagccaatcactaatcaatgtgattcctgtaaaccaatgagaattgctgaccaaaaaaacttgatcagcccactccctgtcccccactttttgcctttaaaaacctgcttgcaacaaaggccgaatgaagctcacatccaaggttaccggggtctcagtcttctgggcagctgtccccactttggctcaagtaaactgtctatattttgtgcctcagccacttccttttaggccgacacgattataatgatgaatgtccaagctctgtaacccttcagtctactgctgtgaaaaatagttgcacatgatcacagggagacacgcgtaagggtgtttgtcctcgtgtcaactggaaacagttgtaatgttcctgagaaggatgattaaagagcctattatgtagctaggatgcaatattatatgcaaaggtcagtgaagcgccgtgcaaaaagatcaggaaagacattgctgtcattttactctccactagttatttaagtcatctatgtatttgtttaagcaaaattcgcttgtagttccattcggtatctttaaagttgaagcatcttcttgcttgattgttttggtgcttgtaggagggtagtaatcactgtgcaggcatttttgggcttggggagtgcttgtgtgcttcaaactgaacagtttccactgaccccctgctgcttgggtgccaccaaaaataaatggaatgagtaatttgaacacaaatgggagaaagcacgactcatttccatactatggagaacttgaatgtcttcaccagaagggatgtctgttaacttggtgctcattcaaaaccttatttggggctaacacttctttataagctgtcttcatgagcctgaagtaattcaccaagattgatttgtaaaacattctgaatcaattaaggctttaatcagcaaagtagcaaacttcacatggcttgtggactaattttaccctctcccgtcaatgtgaacctaagttgaaaaaagaaaacaattaagaggatgtaattatctgtcctgattactgaattaaaagagtttgtgtttatctgtcccagtgtaaaggtggtaaacaatgccaggagctgtggcactccggagctcctacacaaaaacctgcagagcatcctagaagactctagtgaccctgccttaagtgacctggcagcaaacaaaggctgccgagtattattgtgtataaatgtttcccagagcacggtttgaaaaagctccttgccaatggtgggtgggggagtttcctgcagaaacatctcatttgaattactacatggacagatccatctacttacgcaatgcttaggaaattgctttcctttatttagaccagttctcagcagtggctgcatatttgaaccacatggcggagctttggaaagtcccagaaaacactcagaccaattacatcagaatgtctgggggaggaagcagggcgctagtaccttttcaagttccccaggtaatttctgtctgcagccaggattgacagatccctggttcagacagcatttccaggctggtgcagtctcggtctgtgttgttgtggcacagcgagcaaatcttgtgggaatagaatgatttttgacaatgtcttctttttggtaaagggtatgtgttaatgcataacataactaggataacttttgtaactttgtcagactttaatgtttatgcatcagaaagattcctttctcagataatgcttcctaattcctgagttggaaaaagtggttatctgaattatttgttaggcaaagcttgaatagtcagtgactttcacttagtctcttccttattttcacttcaaatgtcaggctttttaatacgtcaggctttttctgaaaaaaatttgagcttgagttactagtggtttatttgggacctctcttagttccatacttcagtgttccttagagcagccgtccccaacctttttggtaccagggagcagttttgtggaagacataaaacatttttcatggtgggtagggatggtttcagggtgttcaggcattagattctcataaggagcatgcaacccatatggatccctggcatgcacagttcacaatagggtttgtgctcctatgggaatccagtgccaccgctggctgatctgacaggagggggagctcaggcggtaatgctcactcaccagcagctcgcctcctgctgtgcatcccagttcctaagaggcctggaacccataccagtctgcggcctggagggtggggacccctgccttagaggatgagcagaggactgctggtgcaaaccctcagcctggttcctgtcctcctgagccattcacttctgttccaggctggattatctacttagcaagatgacccagactccttaaaggaacacagggaatgaatagtgttagccctgcttgcctcctgggttccttacctctcccaccaattgaattatcagagacctttccagtgagggaaattctgcctgaaacttttctccacttgtcagcatttccactgatgccttactgcccttttgagattggcaccccattgcctggctggcccattttattttaactgtggcaaaatatatatattgcataaatgttaccattttaactatgtttgcatgtacaacttcatgttattaagcacattcatattgttgcaccaccattaccaccatccatttccagaacttttccatcgtgccaaacagaaacgctgcactcattacaccataactcttcatcatcctccctcttcagcatcctcactctctctataacttttgttctactttctgtctctgaatgttcctactctgtgaaggtcatagaagcagaatgatacagtatgagtccttttatgactggcttctttcactcagtgcaatgtcttcagggttcatccatgttgtagcagttgtcagaattccttccctgttaaggctgaagaatattccatcgtacggatggaccccattggtttatccacttattccctgacgggcgcttgggttgtttctgccttttggctgttgtgaatctgctgctatgaacatgggtatacagatacttgttcgagtctgcttacagtttctttgggtatatacctgggagtggaattgctgggttgcatggtaagtcgatgtttagctttttggggacacatcatactgttttccacaatgatcacagtggtcacattcccatccacagtgcacacaggttccaattttttcatatccttgccagcacttaatttctgttttttgtttttgtttttgttttcataataaacattctacttagtacaaagaagtaggctggtctatttttcattcactgtgcctggaactggctcacttctaatatgtttacacatagaagaaaaattgtgtttatgtcaatttgggcagggatcaagtttacttctcttctccttacgtttcctattctgttctctttgtttttatagtcaatcatttttacatatcttttgctgtcattttaatggggctttgggagggaaagaaggtcgatatatgttgatagttgttgtgggcagagattcagtaaactgtcccttccctttcctgcctgacgtctccatctgttgaagaataagacaaaagggtaaagcagataggaagttaaaatattgtctttataactaatacacggatattagagatgtggctaatatctctgcaagaaagtaggtttccagacaacaaaaccagagctgaacttggccacccagtcttagacagccccaaggacgtgaggggcacagctgaccttggccgtccagtctcagacagccctggggatgtgaggggcagagttggtgtgcctcctgatctagcctgcttagtaacgggaaagaggaaggagccccagggaatacaccctgtttattgctcccaaattcaccaattagctcagtcacacttctttccccagtgagggaaagaatgagggagcagagaaagagggaatgacaatagtggatcactaataccagtagtgacgatagtgcattctctccacaaagaagaaaacagatgtgagtaagaagcattttcccccagcacaaatcctccatgtttaacagactgtcccatttgagcttgctctctgaccactggtctctcaggggtgctaactctgagcacatttcctatacgtttcttcagtctcctaccactcagacgtcttggctgtggcatgaggtccccgtgccctccagcacgttttactgacaggagtagaaaggaagggcatgtcatacccccatcttgggaagtgatgaacgtccacagagatgagattcataggaagccccatctgagccacagcagatggggcaggagggcccagggggctggaggttgtggaagcagggagtgtgggaggcctggtgatcctcctgaagaagtgagaatgggttggcctaaagggtgagttggtgggagaaaggagagaatgcagaagggcatttcatcccactccctttggagggatgtgggaatgtggagaggagtaagaccgacagactcaaaatgttttgacatgtgacacgccatttacaaatatgtatgctttgtaggcagaaatgaaagaatagccaccagatagaaaccaggtgtctattttccctgagttcttttattttgttttattttattttggagacaaggtctcgctctgtcgcccaggttggagtgcagtggtgtaatcacagctcaccgcagcttcaaactcctgggctcaagtgatcctcccacctcagcccctcaagtaactgggactacaggtgtgtaccaccacgtctggcttatttttttcttttttttttttttagaaatgaggtctcactgtgttgcccaggctggtctgaaactcctggcctcaagcctcccaaaacgctgggattacaggcatgagccactatgtctggcttcacctccattcttaacccatcagttttatggatttttcttctaaataacccaagatcactagcaccaacatcttttcagaagttattttgggctccacagggaaaagaagccctcgtagtcctacataaacacacttaaagtgtgtatttgaaaagcagagagagcagcagcggacctgctggtacacagatcagaaaggagatggggatgcgaaggatgagatgggattgaaaggaaaaggaggcagagtgacagaatacagaataaaacattatgaatatattttgttagttgactttttagctattttagaatacatgcataaagtcctttcagttcttgggaggctgaattctctcattcacaaccaccatattgagccttactttggtctcagatcacactgaagagctgattcacttatgcattcattacttcaataaatactgattgtgcatctctcactggagaggccccattccaggctcagggaattctaggacaaggagaacaaagatgaccctgctcttctgagctctgattccagtggggaaaggcaacaagcaagtcaacaagcacataactgtgatcattccagagagtgatctgtgctttgaacgatgaaagggggccaagtgattctctcagcagagagaacaagtacacaggccttaggaaggcgggacttttttgtgtgtagggaaagaaggccagaatagctgggttacagctcccaaggggagggcaggatgagatgatgaattttgaggagaggctctccagaacagtgcatgcacgcactagttttcatgcaattccacggaggtcgtggactcccctgcccctgcccataatccatggaccacagattaattgaaaagagagactgagcattgattgtgaggcatacagacaccaggctggttagagtggggaagtgtactgttcccagggcacaggaatggcatgctgtgtttagggatactggctgtggaggaaccacttgagaggaggcgtaaggacagactgtgaaggactttgatgtccaggctgaagagtttgaccttgaacccattagccatgggagctggactgccgagagaacacgtggcctccatccacagccctcagctcagtctccttggtaggccttaggctggtgaaatgcaccagctctgccatcctctgtccttctggcaggttaacaacaaagtggctcacatgtggaaataaacgtggctggtatgagtgggcgcaggccttcattccccgtgctaatggaaaagccgtatttttccaagtggtgctgtaaaagctaagaaaaattaagcttcaatcaaacacagaaaaagcttgattttaagttagattgaagtgaaattaaaattgaccttggccagttttgttctgaagagatgagttcaaactggccaaagaaaaaaataggcccctaacacaggagagagaaagagtggactcttcattgaaagcatgtttttctcaagcatgtgaagaaactagaatttgattattttggtgtgaaggtatataaaaatgcagcccttttgattaagccatttttaaaaacctaatgtattagtccattttcacgctgctgataaagacatacccgagactgggaagaaaaagaggtttaatggactcacagtgtcatatggctggggcggcctcacaatcatggtggaaggcaaggaggggccagtcacttcttacatgggtggctgcaggcaaagagagagagcttgtgcaggggagcttctctttataaaaccatcagatctcgtgagacttactcactatcacaacagcagcatgagaaagacctgcttccatgattcggttacctcccaccaggtccctcccacaatacatgggaattcaagatgagatttgggtggggacaaagccaaagcacatcacttaaaatatggtttttgatatctggcttattttctggctttggggtagtgtgcttgtttcttaaatcagaattttctttagaaataactatgttttatttcttcgctatcattccttgactatgcatggatctctgctgcatgaacatgttctttttttttcatggaagaaataaatatcatttctggcagaccatgacttatcctttctatctttctcgagatgatcagactccacagattgtgtaaaacttctcggaaaaaccctatttcataactcgagagtcatttttgtttgaatgtttcacggaatgttaatcctggcatatttggctgccatcatgaaggactgcagctgtgtggcgtggaaagttcaaaagaaatgacccaaaggaatgagtcataggtcagccttacaaattgggaagaaatataatcaggtaacctgtcatcacccactagaagtgttattatttattgtttattggtaaaaaataaacctgtcaccaatcattgattctgaaaaatgtgccgcttagtttattccaatgattggtacatgagctgggaggatttgtctcagggaagcactgtagttattaaataccatcaagcggacccttgatataatgaggttaaaactgtctgtgtggaggaactatactttattaaagaaggaataggaaaagaaagccaccttatcaaagtcagctttacagactaggtgacaactggttaatgaatttgctattttagttgaaaacataatttgcattactgttagacaaaatagatggggggcctttacaatcagataatgtaatctgctctagtattatggtccaaccctgttctttcatctataattttctcccacaataatgtattactattttaatactgcattctgccctgataaagtctagacttgcatcccaattccaaacgtcagcataaatgtacatatgcaccttttattgtgtgtcttcataaaccaagggcacttccaggggtacatctgttacctttaatttgcacacataggtccctgttcatgggctgctgtttataaaaaggggtttcattggcatcatttcagccttcagagtgagaaacattgaccctgcttgcttttgttacctaatattctgagctgaataaatgatgtgtacagtatcattgctccgtatgagaaaatgtaaatgactacattacattgttggaaggcagtaatacaaaagggaaatatgaagtcagccgacatttctcattcgggaaaaacaaagctgattctggtgattctgtgtgggagattgtactgggctgcaaagcgttgtcaattgaagatttttttttcccccaaaaaagaggaaactaacagtgtgctttttggcacagttgtatttttcatttcttttttttttttttttttttgaggcagggtctcactctgtcgcccaggctggagtgcagtgatgcaatctcggcccactgcaatctccacctcccgggttcaagcgattctcctgcctcagccttccgggtagatgggattacaggcgtccatcaccaggcccagctaatttttgtatttttagtggagacggggtttcaccatgttagccaggctggtctcaaactcctggcctcaggtgatctgcctgcctcggcctcccaaagtgctgggattacaggtgtgagccaccacgcctggcctgtatttttcattcctctaagatttcagtcaggtgtgcaagcccagagggaagcaggatagctgggcttcggggtcagctccaggcttcctgcagcggccaccctgtgcccccagcccgctgcgtcctcttcccagcagctcctcccctccctgcttgctcagcactcggcttccacaggccacatctatttttcttgcaaatcagaaaatgtgggtacagtgtttttaacttttgaaattttagattttgagatctcacctgacattgagagacactggctctctcaggcagtccactgcacatggagatgtcttactactcagcaaaaaggaggagggggctacagtgtacacttaaattaaaaaccaacctaacacgttgcttgcgaactttaacaaataatacattggttcctttggttcccacagggtaggaaaagaaaatgctgttgaaattattttatttgaaagaaatgccatgttgtatttattgtttcctcagtattgcaagttaaaaatctcatggatttatttaggatcatccatctaagtgcagtgcaaaaggttctgcataaatggagttctgtcattgcatcattaaaagtaaaaatgatcaaaataataaaaggcatttaaaaatgcatcattctttaatacaaagccttggtcagcattcagggaagtttatgtaaagctatataatattttgcttttaagactccataaagatgttataaactaggggccatagtttccatggatttttgatatattcaacttaattttttcattctataaatttattctaatatataaagtgattgctacttttcgttatttttacagcgacttggccccttttaagctgagggaactgaccttatgtgtcaatttccaggggaagatgatggccatcaggagtaaaaggagtgctcaataaggatgtaggtgttatactgaacaagaaggacttagcgggtgtcataattttaaagtaaatagtttttattcctgtctcccactgctccttcaagatgctctcgttatgctagtccttccctgaccttttgagggaagtctctagcaggtaccatttacctttttgtaaaaaagaaaaaaaaaagtaaacttttaattttaaataattttagatttacagaagagttgcaaagttagcacagaaggttcccatatacccttctttcagtttcctgtaacattaactttgtatataaccataataaatttatcaaaatgaacaaattaacattggtacattaccattaaccaaactacagagtttatgtagattttacccatttttccactaatgttttttgtctgttgcagtatccactccaaggcatcatgttgcatttagttgttttatgttcttagtcttctccaaaatgcataataacagtttctcatcccttccttgttttttatgaccttgatactttggaagggtactggtcagttattttgcagagattatttgattggtattgtattaaactatagatcaaattggacgaagttgacatcttcacaacattgatctaccagtccacgaacatgctgtacctctctgtttatttcggtcatctgatctttttcatcagcattttgtagtgtttagcagatagatcctgcacatatgtcaatagatttatacctaagtatttcttgactttttttttttttggtgctagtgtaaatggtagttttgggttttttaatctttcccccaaattcccattgttcattgctggtatataatacaattggtccttacatattgaccttttatctcgccatcttgctaaactcatttattatttacagaagattttttcacagattctgtgggagtttctacatagacaatcacttcatctgtgaatagagagaattgtatttcttcctctcgaatctgtattgccttgttgcactggttaggactgaatagactgtagtacaggggatgtgtcttagtccatttgtgttactgtaaaggaatacgtgaggctgggtgatttataaagaaaagaggtttatttggctcatggttctgtaggctgtgcaggaagcacggtgccagcctctgctcagcttttggagaagacctcaggctgcttccattcattgtggaaagtaaaggagagcctgtgtgcagagatcccagggcaagagcagaagcaagtagcggggaggcgccagactccctttaacaatcagccctcccaggaactaagtatagtgaatgaccaaccctttcgtgagggatctgcccccatgaccccaacgccacccaccaggccccacctccaacactggggatcaaattacagcatgagatttggaggggacaaatgtccagattttatcagagtggttagaaaaaaccacctctccttattcctgatcttaagggaaaaagccattatcttttaccattaaatctgatgttagctatatgtattttgtggatgtcccatatttggttaaggaagttcccttcaatttctcattttctgggagtttttgttatgaactttctcaaatcttttcttgcatctattgagatgatcatttgttttgttttttcttatttagtctgttaatttggtgaattgcatagattggtgaacttaccttacaatccttggatgaatcccaattggtaataatatgttattctttcgtgtacttttatatatttctggattcattttactaacatttcggtgagaatgtttatattctctattcatgagagttattcatccatagttacgtttgcttgtgatgtgtttatctagctttggtattagggtaaatgctagtctcataaaatgagaagtattcccttctcttttattttctgtaagatatcgtatagagttgttatgttcggaagatttaactagtgacactgagtctggagttttattttattttgtttttaaaggtttcactataaatacaattttgttaatacatataagactattcaggttgtttttcttcttaagtgagtttttgtagccttttttcccaaggaattagttcatgtcatctaagttgttgaatttatggtcataggattgtttttggtatctttttttttttttttacatatgtgatatcagcagtgataccatattccactcgaatattgtagttgtgccttctcttttttcttaattagcctgcctagaaatttactgcttttattgaaattttcaaagagtagcttttggtttcactgatttaatgccttttttctgaaaactttcatcatggatgctatagagttcacaatatacatttaaaaatctgaatctacctccacataatgctatgctgcttcacacggagtataaggaccttataacagtgtatttctaattcccctctcccattccttctactattattgtcatacattttacttttacatacagtatcaacacaccagatatttttactattacagctttaaccagtcagtaatcttttagagaacttaaaaataaataattttaatttaccttcctttattccatttatgatgcttttcatgtcttcgtatttatcccagtctctgacctatatcatactccttttgcctgaagaattttctttaatgtttcatgaagagtatgtctactggcagtaaattccatgagatttgtttttgtctgaaaagtctttctttctccttcacttttagaggatatttttactgggtgtagaatcctgtattgagatgtttttctttaaacatttgatgtaattccactgttttcttgtttgcatgagttctgccaagaagtctgctatatttcttatcttgctcctctgtaggcaatatgtctttttttcctctggcttccttaaatattttttatttgtcccttctttttcagtagtttgaatatcataactagatgtagagtttgtgttttgttttgttttgttttgctgcttgatgtcctctaagctttgatgatttggtgtctgtcactaattttggaaaatcctagcccattattttttcagccatttcttctgtcccttctgtttttctttctgattttataattccaattatgtatatgttaggctgtttgatattcttccacagtgcttgcatgctccatttagttttgtttgccttgttttttctctttgcatttcagattgattaattcctattgacccatcttcaagttcagtagtcttttcaagtctgctcatgagcccatcaaaagcatttttaatctaaatactgtttttctgatttctatcatttccatttaattctttttcacttaattatttttatagtttccatttttgtgtgaaattacccgtctgatcctatatgttatttactattagagcctttaacatattagctatagttgttttaaattctttgtctgataggtccaagatacatgtcatgtctgagtcttcttctgatcattgttttgtctctttgtggagtatttttccttgctttttttcatatgcctcataatagttttgttgttgttgaaagcctgttatgtcatataataggacagtagacactgaggtcaatattttgtgtggttggagatgagcatgcttttctttccactgggccattaatatgaaggtttttgttcgtttggtcagagatttggctaggtttaaagtttatcattgccatggttaccctcattctactcgaggcctaagtttctctagtggaatcatgtgttcatagcatgggataatttttcagacttgtctccgtatctgctccccatttgtcttttgagtttccctgacttgactttgagtcttctctttgcactggtcccctcagggaatctgcttcttgcagctcccctgctgtatccttcaattatgtttgcttagtgcttttgagtgtgtgcaggtcatgtgtgtgcagggattgagggcattcttttctgttctgattaagcctcaggcttaggcaggtgcctgtgaatctggggcctgaggctgtagtcctgacaagtgttcctgctccttccctacctgtcatgctgggcctagcatatattcccgcctcccttccaggggtagaactccttctccacccccgttcccctgccctatctgcagtgcgatcccacccctgccctcatgctacagtttttgttttgttttttgctctttctcctgcatagtaaggctttcattccttagggaagatgggggtgatgagtgtgtgcagagtttggtggtagctaccatttctttctgaccacagtaagattctagcagtgccttaaagctttagttttttgtccttcaccctatagattaaagcttttgttcttccaggaacataggggagatacgtctcaggagagttttggcagaggtgcctgttcttcccccacatccagcaccaagtgggggaagctgtcttaggtttctcattgagctgccctgagagcaccctttagggttcctggaggaaaatcctactctaggctcttaacccctttatgtcctggtctgtggggctttatacacgctcactagcccatacttggccttaggcagtttattcagacttctagttgaatcttcctatgggcttatagtgagttcaaggtgtctgtcccagataagcaaatggttgggtctgtttctccctggaaatgtctatctctttctggattttctaggttttgagttagttttttccctgtacccttggttctctgacagagtcaagaaaagtcattagtctgcacttcgtccagcatttttcctgtggtaagagtgagagcaatgttctttccagctctctacctctaggagctgaaagcacaagtttgctgtagccagtttctgccacttaccttttaagtcactctcagaaaaccaaatcgttctttagttcctttaatacccaagataatccccagatcacaaattaaactgtttagtcccacatagaggaaaggctctcggagcgagtttttgcctctcctatgcaatcgtgtgtcaagctggctctctgcagtgggaaaggggctgtggtaggcgtcccctctttatccccacttcagcttcttctccatctctctcagctctatgggttccacggaaccctcccagtttgtagatgtagagactcgggtaggaaagattggcaaaaactggggtgtgggcagggatctaaaggaaggagacagaaagttcagacttgaccagtactttctggaactagcagaggtggttggttataggtggtgttctcttgttagactctttgtggatacccctgaaacccctatatccttgggaatctccaccttcaggccccttaatatgtaagagtgtaccacctgcagctggtaggtcctggtgtcccctccttaactcctaccatcaggggctacacttccagcttctttgttctctcacttgcctggcagttctcttgagcaaagtctaagacactgtttctcacacaatgtgggggaaagttttgcttggtagcctcttgccataggtggtggaagtatgtcattccaatccaccgctcttccactgcaggtgctctggccagaactgctgtggtgtgagtcaggcactagtctgctgtttccctccaaattgccggggacacatccagactctcccagtgtcctcctgaagtcctcacgcttgacttgaagtgaagtagggtaggggctgaactcccagcatcctggcaactttgttcaaagtatttctcctaatttccagctttttgggcagcattttccccagtcttctttggggtagaaatgtgtgaccagctaaagtttgcaaaacaagtttttgacatccaatgctgcaggtcctgttttgaggaccttctaccatgggatgtggaaagaatcatcacatcaacttcttgggacctcaatataaactaagccaggaagaattcaatatttaaatctttttgtcctcattctcctaaaatgaacagatgcttttagaaactggttctaggaagtactttttctctgggtattatttttataattttaaaatgtaaaaacaggcattgagaactcataacatcttaagatatttagagtttaagatattgaaaattacatttcatatttcaaaacctaaaatacaatactatagtagaccttaagtggccaaatgaaagatgtttttggagaggaatggatacttactgtcttttcttttgacacagtggcacttttaatcaagataagtgaccaggcttccatgtgaagtctctagagctaaggtaggagatactagttgggctggattcaccaaatgttagcattttaacacagctctatcagacttcacacaggggccccaaaataatttttgtgtaattgaattatgtccattttaatagggattttctttttaaacgaattctactttgttcttttcttaaagcaaagacttttatgctaagataaataccttctgtccctctgcccctctcccatatttcctttgtataaatcttcattcttacattcagaggtgacgtgggcatagttgaaaggtcacagttaaaagctctagcttcagaaccagagaggcatggatacaaattctggctaggaacagaccccaatccattggaatgaataaacaactcatcagagtggccacttggtctttcagtccctaaaccctcctggcccatggcagctgagcgttgcccctgttttttccatgcattggagagtccgcctctctgagctatgtttcctccacacttgaggccaataatcatcttgcagagttgttaggaggatcaactgagggaccaactgaggttccttgcacatagtaggccctcagcagaaagtagctgctatgacattgttaaacgttcgacatctcaaagagagaacaaccgtgttccctctccaccccacagttcagtgtgcccagcttggaaactcacatctttttggggattagttaattgattggagatatgaactgtatctagtggaggcatgtctttatcttctagagaaaaatctttagatggtttatcccttttaactttggttataaaagtattaaaaaagaatacacaaaagatctgaaaaagaaacaaaatcatctgtaatcctatcacacagagttaaccactgttaacttttaaagcatatcttttcaaacttttttttctatgaaaatatggagattcgtataagacggggtatcatcctaaagtcaatgtggataacccctttcactcagtgctctatcacagacatgttttcatgtcagcaattaacaccttcatagaatgccatgatatggattttctaaatgtatttagccatcaatggaatttaggttacttgcagtgaactgcagtgaactgccttacacataagtcttttaatacatacacagctgtttccttagagtacattcgttgaagtaaatttgctggaacagagggaatgcctattttaaataatgagacatatcaccacattcactttggaaaggctgttctaagttgtacatactcccattaaagcatatgtaatgtccctgtctctgcatttaaaagctcttgaataaaacatttttatagtctttgataaatgagagaagtttctccccaaaatcaaacagtatcttttcaatttttttttcatattaaaagagaaaaactcagttgtttaaaaaataaataaaggcttttggccgggtgcggtggctcacgcctgtaatcccagccctttgggaggccgagacgggtggatcacgaggtcagcagatcaagaccatcctggctaacacggtgaaaccccatctctactaaaaatacaaaaaaattagctgggcatggtggcaggcgcctgtagtcccacttgggaggctgaggcaggagaatggcgtgaacccgggaggcggagcttgcagtgagccaagatggcaccactgcactccagcctgggtgacagagcaagactctgtctcaaaaaaataaaataaaatgaaataaataaataaataaaggctttttaaccacaaacgaagttctcttgtcatgacaactattaacactgtatttatcggaattggtgaaatcttaaatatcatctcatataatcctctctctttgtagatgagcaaagttagatcagcacttagagggttcgaagaggaagagtctcctctgtttctgttatctcttttcttctcacccaccttctcatattcaaataatcatcttttttttaattcctagaggaaatattatttttctcctaatatcagggcagccctgtgacatttaaaattcttttattggaagtctaacatgcatacacaaaagtatacaaatctcaactgaatgaactatcacaaagtaaaagcctgtgtaatcgccactcaggtcaagataaaaaaaaattttaattaacatttgctaatacagatgatcataatgaaaaatgtaaaattgctgtgacagtctcttggactacaacttctatatccgacagtcagtaatttcttgggagaaggtacccagttggtctccccacctttacgattatacttctctgggggacaatctgtaatattctgtgtgcggtaacttgcatagttttaaaacgatccacaccactgaatattcttactattcgtgaagccaaaccaagcagttgtaaggacaaaacatggcggctgcaagagtgtgtgattaggatgacaccactgtggcctaaaaccaaatgctttggtacaagtcaaaaataaatggtttggtttcaagtcacaatttggtattacccttgcagttactagatgaaggtggaggcaaacaactgggcgctttgcatctgagaagtctgcagagagtgagaagtatttgctgcagccgctgggctcagccacttgcccctgatgtcagaactccctggaggcagagaccgcagcaccctgactcctggaccccacgcccttttcaaggggccaggctgtgcttcagaaccttggcagagaaggttccaattctgtaccggctcctggcagccagccacgctcccggtactcagcctcactcagccattcgctgcgtgtccaggatggacacccagtttaatcttgttgttcagtcaatagcttttgcattatctttctttttgtggttaatgtaccatttttcttcttttcttcccctacacaaacactgccatgcctgaagtacttcccctgcttgtagagaagttatagcctgggctgtagtggaacagtgctctgattaaagtgattaaaactatatacagcatgcataattaacctttgcgcggctgtcacagcaagctgatgcatggagctgataccatatctgtctgtggcaggcggcgtatgctacatgaccattttttttttcctgcagaattttaatcacttgagataaagagccaggagagagagatcaaggctgtattaatcttctcaatggctttataatttcccttctattctgctgctggtaatcaagaaaaataatgccgccttaatcctggatgccaaggtcaatcatctctgtgccctttgatagtaaggatgtcattatgaaagggtttttaatgaacatgaacataatgctcgccgcactcctcagggagatggatgcgttctgcaacttcgggatggccaggtgggccttcattgctgacaaaaatgattttaaaacattagctctattagaaataaatcccgaacagctggttgaggttgcagaccagccgtacccagcagtgattgagaaattcaggaatgagctgcagcaggtcaacaggtgagaagggcccaagccctgattagcggttgggcaacacagcgagaaccagcacggggcgggggccttgggtagcctcagcagcaggagcccggcccgcggcgccaacaccagcgcctctctggagggctgccaagatcaaaaaagtgcagcgatgcgcagatgcgtggtgacattttaaaacaatgccctggtcttttttttttttttttttttttttttaagaacatgcagacaggtgaaaaacaaaatcctttcagctcaaacgcacctgaactaaatcccagagggctgagtgctgctgtaccactccctcccgctcttacttggttttcccaaaaacacattccccaggtcgaggtggtggagctgacccagccttcacttcactgaaagacaaaccagacgggctgagagcagttcccgggcctccagaggctgcggctcgcacagctttgccggctgtggttatgaactgtgatctgacagtggaaggcagcacttgttaggaaatctttatgtagcatgggtcacttaccctggtgaaggaaaggcgaggaaggcgtcgagttcagacttcaaatacacatgaggtacctgggattaggggaaagaaatgagtaacaagccgcccactcacccttgagaacaaaagaaaagagagaccttcatctctggtagacaggattttaataagatttgggaaaacacacaaacattcttttttttttaatctttatttttcatttattttcttcagcttttaagttccggagtgcttgtgcatgaggtgcaggtttgttacgcaggtaaacctgtgccatggtggtttgctacacgaatcaacccaccacctaggtattaagcccagcatgcattagttattcttcctgatgctctccctcccctacccatgcaacaggccccccagtgtgtgttgttcccccgccatgtgtccatgtattctcatcgttcagctcccacttagaagtgagaacatgaagtgtttggttttctgttcctgcgttggttttctgaatataacgtcttccagctccttctgcgtccctgcaaacgacaagatttcattcctttttgtggctgcatggtattccatggtgtatacgtaacacattttcttcatccattctatcattgatggacatttgggttgactccatgtctttgctattgtgactagtgctgcaatgaacatatgcatatgcgtgcatacatctttataacagcatgatttatattcatttggttatataaccagtaataggattgctgggtcaaatggtatttctgcttctagatctttcaggaattaccacactgtcttctacaatggttgaactaatttacattcccatcaacaggaaaacacacaaacattctaaagtgagccctcacaccagaatggttcctataaatggttcttctttgtatgtcttttaaaatgcattagatttactttctctcaagtggttcatggtacagcttcccttcacattgagggatgggctacggaagcttggagctctgttcccgggaggctcctgaattaccagctatattagtccattttcacgctgctgataaagacatacctgagactgggtaatttataaagaaaaagaggtttaatggactcacagttccacatagctggggaggcctcacaatcatggcggaaggcaaaaggcacgtcttacctggtggcagacaagagagaaacgagagccaagtgaaaggggaaactcctataaaatcatcagatcttgtgagacttattcacgaccacgagaacagtatgggggaaactgctccatgattcagttatctcccagccggtccctccaaaacacgtgggaattctgggagctacaattcaagatgagatttgggtggggacacagcccaaccatatcaccaggtggggggtggctgtagaggcccacttgaaatgcctttcactcctgagaatgctgcagggagggcgaccttggatgggcagagtcaaggtcaatgccgtatgagccaggagaccctgatgcgggaggcccctctttctcttcaagggctttgctcattcttctctcttttatcatctgaccccaaacactgattctttccttctagaatttgtgtttggactcagtaaatacctccatttggattctactcatttagaatgtatgatgatctgacctagtctgggatgaaatttactcttgtaccatctttgagagaagtgtacatggagccagtgtagaatgtaaatagcattgttggagcgtgtttcacctccttccatgaacaaactgtttttaaggacttagacaccgctgttgtcactatttacaaatgagccttctttttttttttaaaagccaacttggcagggtctctcctggaaaccactttgttagcaattctcttcaccagttaaaatgaaaactgaattataaaaaattctataatttagacattctctgcttcctctgagttactctattgacgcagaaaacaatttagtcatgcatacctaagagattgttctggcttttttccccttcaaatgtaatttaggtaatggaacatttgccccgtttccatagatcagttgaagtgctggctggaagggccgcccagatgtgatcctcataagaaattggaacataggaactgccacactgagttattggtgcagtttatggagctcagaggttttctactggtttctacagagcccacgggttccagggaggtgcctagaggtcttctgaggatgaagcaggagattcacggggtggccagtgggcaggaccccacacacacaggcttcgaccagagaagcctgctttcctctgttttctgcattggggttctcctaggatttgttagggggaaaagaggtttcttaaaagcttaaggccttgtatatagccctttgctctgtctcaatagaatttataaagacaagattgatctccttgataagtcttaagcgaggaacgtgcctgaacggctaagtgcttgttgcagacattatgagcctgtctgccgcacatgaatccagctgtgtgtgtgcacatgcaggtgtgtgtatgtgtgcggcccttcattatttgaggcccctaaaaaatcacgtcgttgccaaaatgagttccagaaattcatccagtaaccagggcacatggggaccaacagaagactttgagcttaaatagtcctggaccccagatcgtgcaggcctttgacctctgttcgaagaaatcaaaactgtgccatgaagacagaaccagaaacctagagtcgtcctctggacctcgctccctcgctccctccctccctccctccctcccattgtctagcagagggatcatcactcttcctccacggtggttcttgaatacagtccttcctccattcctcttgccctagttctagtctcatcattttggcctaaatgacttggtatcttaatttttctgtctccagcgttttctccttcactcaaacgtccacatggcctcaatattcctacttttaaaacatcaatacgatgaagtcaccaaacttaaaaataatctttagttgtttctcattgccagaggatgaaagtccaaagtccaacccccttaggaagatatttaaaactttacacaatgtcattctaagtgattggttttttgtttgtttgtttgttttttgtttgtttgtttttttgtttttttttttttttgagacagggtctcgctgtgtcacgcaggctggagggcagttgcagaatcatagctcgctgcagcctcgacctcctgggctcaagcgatcctcccacctcagcctccgaaagcatggggattacaggcgtgagccactgcacccggccgcctttctttccttgtagctttttgatggctgtgcattatttcatgtcccactagactgaggctcagtgagggcctcttgcgtttgaaagccttgtgtctggcgcataaaaggagttccatgggtttgaactcagtgcgcgggaagttgtgctttgttgtttgatactgttggtttgtgagtatcactgcacgccaggcctctaacgtttgcctctttctacctcctcacaactactttactcagtgagagcagttagcgccgtttctcagatgaggacactgagtctcagggagattaggcacctgggttaactttattattatttaccatcctttgcatcccccatctttgagcacatattgtgtgccaggcttgttctaggtgctgggaacacactcactggaggctgagggcaagtgcacgggccagtgtggggaccggcccctccagctccagctcccaggaactacagctatgggcagagcccatgaagcaagcgtggttagatctctataaatagttacatctctggtgtggctccttccaacttgtgaaggacaaggtaactcctcagcgtgagtcattactgaattacagattagctgatggggccttctctgctacagagtgggcctgggctttaaggcctgggactaggggaggtggaagcttatccctttctcgccataagcgctgtcactccagagcggtgctgcgcaaattggaaaggagataggaaggtgatgtcctttcacccttgacctcctagtgtgtctcccccgacccccaccccgccccatctctgccaatagcccctggggactatggctaaggggtcaggtgcacctgagcctaaacctgcccatccctaaggctgttctggtaattcgggaatgagggatgtccacaacgcgagggctgtgggtccgagaggccttccctgctggccatggcagtccctagtggctggttttgagcgagtgctataagtgcactggcagtgactctaggccggctgctttgggaataacgtctgtaaactgactgacgcccggtggcaacagagttccttgaatttggtaacttgggggtgggctgcgtgggctgtgggggctgaagccacctatgacacacactcatcacattccacagagaatgcagtgcagccctctctgatgatttatttgctctgttttctgtttattgtacgttattatccctgtgctttcggtacacgtgtcacttactaagaacccaccatggctttgtcctatcaagtcggccccgtctagcacctcaggcctgtaccacctggctgcggctcccagccctgccttcctccctcttgatggtgtgggagaatttcgtgtgtctctgttttctttcctaagttgataaacgctgtggtatcaattatcatatctttcaataaataggttagatgttgcttaattgtttagttaattcctggcctactttatttcctgtgatgccgccatgccaagctgcattagttgtacagttccattgaagcctttcccttctcttgtttcctcccaaagttcaaaataagtaacaatggtgatgacaaatgctaacactcatttagcactttctggagatgccggagaaaagtatgcattctgctgttgttttgttgcgaattctcccacttactcctaagttgagttctgagtttggatggtctcagaggcatcccgtgaaaaaaggatttcagtgcaaggggtttatcgaggaggtgatcctaggaggcggtgccgtgccacagggaagggaaggcagcagatcggaggttatcaggcatggtggccccgcagagacctgcagctcagcccctcaggaacaaagggaggtggtgcaaaacacggactgtacagttatcctacgtcagggatgaaggatggatctgggccttctacagcaactcccagcagtcacctttgttcagtgctgcacatcggggattctaattctctggaacatctggtcattgtggaagaaagcagagtggactccagccaccagagagagaaagctgttaggcaaagagatagagatgccggacataggaagtcggccagcatgcgctgtacggctgtagaggacacaggcagcagcagcacggctgcaccagaccatcggggtatttttactttacagataatgaagctgagtcttagaggactaagtagcttgcctccagtaacacttggaagtcttttgtgttctttactctctgaaaaattctgacaatacaaatatttaactttcagttgagttcaccagttgttcagtgagcttggtttctgcctatatttgggttgggtatattttccacttgaccctgcctcaaaagttggcttttggccagacatggtggtaacacctgtagtcccagcattttgggaggctggggcaagaggattacttaaagctacaaattcgacaccagcctgagaaacaaagcaaggacctgtctctacaaaaaatattaaaaattagctaagcatggtggtatgatcctgtagtctcaactacttgggaggctaaggcaagaggatcacttgagcccaggagtttgaggttgcagtgagctgtaatcacactactgcacaccaacctgggcaagagaatgagatctcaatttaaaaaacttggctcttgaagtgccaagcctccttgcatccatgaaacattatgttgcagcctactctgaagagaaaccaatgaggctacgttaatattttttttgaatgatatatttttaattcagacttggagtaattgatgggctaggttatgccgctgttgcaaacaactcggtaatctcagtggtttgacacagcctgggttcatttctcacctatacagcgtccacagcaggtccatgtgggtactcaggggtccaggctgctttgatcttgtggctcccctatctgaagctcagcagtagccctggcaaatcacaaggatgactggagacttgtgcttggacctttcactaattcactccagaaatgataatgacatttctatttccatgtcattagccaaaaaaaatggccccaactaattacatgaaagctgacaagtacaatcttccttgtgcctcgaacaggcaggggaggaaccgtggagtattagtgaacatggaaagcatgtttcccagtagagaagtaataataattgagcaatcatgatcaaggcccgcctagggcatttcctggggatttctgaaaggctggaagaattttgccttgggctgtaaatgtcaattgctcattaattcctcagaaatgcccacagccaaggttgctattgctaataaaattcatttgtttggttatttaacaaaacaaaaaaagcatgttgtcattttcccctggcctgatgattcctgaagcagatgattattctctatgttctacatcatatgagtttgtatcatctttttcttttctacctctccaagtgggtggggagtaaatctcattggcctgaaatatcatcacgggcagtactcagccattgttctcacagctgttttgaaatataaataacaaaaaaatgcattttaacgttaatttcaatatttctttccgccttagcaactgacgtaagatttgctggtattgggttttctgcaaatttttattcaaatgtgttgtcttgtatttcttttgtctgtctgactgttttacagaaaaagtgaccactatgtagttcttgtcaccttaacaataaaggtgcttttcaagtggtctatatttcttttaaatatgtttcagtcaaaaggagaccaaaagagttagtaaagaattgggtcagccttactgaaacaaatggttgaagtttgacttctctcatcagtgaatgatagatgccgcaccttctgcctggctggcacagactccatttgatgtaggaggaactcatacccttgtagcttttcccacgttgttgtgaaaactgcggaaataattccttgttccatgtgagaacgagtcatcacttaacttgatgctgttttcatcatattgtcccatcccacagtctggcccacagcctggcccacagcatcggggtggaaccagaaatggctcctgcggagagcaaagcaggacatgaaccgtaccccgcctctgcaaggcttatgctgttattagtcctgatgtacagagtggattcacagaggcccttgaggaccaaaagagaaaatatattcagtaaatcaatggtgatgcgttaatagactgctgctgtatttgttgttcacagaatgtaattccttgataatggcattttctacagtatatcatcacagaacaatagcaatatcaccacaacaggagtgactttgataaattatacaagaataggatcttataatttagtacagatctaatttaggttaaaagtattggtggagaaggagatttcatttttaacattgttcagaggtacaaaaaatcctgggagaaaaaattcagacatattgtgagaagccaatgcacatattaagttattggtgcagatttcgcaaggttttcacatcttttgactcattctcgtattctatatgttatgctatatgttattttaatgtttcattttactagaagttaatctatgtgtctaaaaattgcaagagtgttaaaaaggaactatggctctttattattttaaaagtggagatctaggaatagcataattttgttgctattgagtttttaactagatgtgttgatattccttgataatgtttcaaggatcctgacataatcaaccgtggctcttgcttcctctgggaccttgaagctcaaaaacccagtagcagctcttagcactcttaaggctgataaaaattgagactgaaagtgatatctaatcaatgcctctgagattcaatcaaatattaagatccttgaggccatcacactatttaattggattcctaatacttctttatactcagatagactcctgtgtccaaaggcactcacattggtgaagctggcagcacatcgtgagaggaggccattctccctgtcctggcccctggcatcccagagtcaggcctacagttgggctctcccaggacagtgaatgaagtgcaggtggcagaaagacaaaaagagggtcgagttccttcatggcagctgtagctgcattggaatctaccgtggtggtgtccagaggtggcatgccctacagtggtaccagtggcattctggctagatgattctttttttttttagggatggtgtcttgctctgccacccaggctggagtgcagaggagcgatctcagctcactgcaagctctgcctcccggcttcatgccattctcctgcctcagcctcccaagtagctgggactacaggtgcccgccacctcgcctggctaatttttttgtatttttagtagagacagggtttcatcgtgttagccaggatggtctcaatctcctgacctcgtgatccaccctcctcgacctcccaaagtgctgggattacaggcatgagccatcgtgcctggcctatatgattcttactagaaggcggaggttgtgtttcagaggtaactagtctcctgctggtctgtcttccaaggccagtcaacctcttccagcttttgtgaactcttgagaaccttccaggaaactccccgctcctcctcctcacttttgtgtaagttaacctgattggtttctatcatttgcaaccaagaacctctgactggttcagtggtcagtattggctcaacatttcctaaatgctcaaatcagacagagccttgggagaccgtctgtccctcattttacagatggatttcagacatggccctagctcagagtcctgcagacagttggtagctgagcagggactagaactctgtcctcttgattccagatacagtgctcttttcacctgtggcctttctagtctagagaattactctgcagacctgcactgcatggtaggcgctagccacatggagttgttgagcacttacaatgtggtacaatccaaattgatacgtgctatgtgtgaaatacacagcagattgcgaagactttgtgccgggaaaaatgtcaatgatctcacatttatgtttttatgttgattgcatgttgaaattgtagatgtgttgggtgagataaacaacatcattaagcttgttttttacctttttctttgtactttattcaacatggctgtcagaaaaattaaagttgcatgtgtaacatggactatgcacacgttgaaccaagctgctgtatgcaattataagaaaagataacacttgagtctctatgggtaacattgggcctgtggttattgtgctgggatattgtatttgtttttgctgtggttaaaaaaaaaaaaaagtagcgggtgtggtagctcgtgcctgtaatcccagcactttgggaggctgaggcagtcggatcacctgaggtcaggagttcgagacgagcctgggcaacatggtgaaaccctgtctctactaaaaatacaaaaattagccaggtgttgtggtgggtgcctgtagtcccacttacttgggaggttgaggcaggagaatcgcttgaacccaggagggggaggttgcagtgagccgaaagcactccagcctgggtgatatagctagaatccatctcaaaacaccatttatttttcactatgggtctaccagttggctgtggcttcactgggcccaaccaggccagcctaaccttagctgggctctatgtgttttacattttgggacccaggctctggtggagccatcactgtctagagcacatccttcaagcaccggaatagaactggaaacacagtagagactcaaagacaggataagcccagtggtacttccactgggaaagaggatgggggaggccccacagtccacagcagtcctagtgtcctgctgggcaaatatttcaaggacccgtaggctgggagtagggggtgtcgattgggcctcagtcgtgctcccggggaggactttccaggccgtggttttcgtggctctgaatctgccctctgccaggtgcactcttctgtcatcctccatggctacctctgaggaaggtgctggaagacatgctctccttcatggctgagcagatttcttaacctgcttcctgcccataggaaggatgaatgccgaggatcgttttagatctcaaatgccacggtctatgttaatccagccgaaagtgtagttatcgatttgtcccttttgaagctgtcctgtttgtttttaatctctttgattccggtcaaccccgtgtgcctacagtcatttttcgtgcatgtcctcctttctctaaactcaattccaagtacactgagcacatcatgcttccaacaggccaaattctgggtctctttctctaggccattttgtgcagttgaaagatttcattggggaccttgataatccaactaaaggtttcggcgcaagagccaatgattgcatctttgatttggtctttacccgtaggctgtgctttcacggccaaccttaatttggtgagaaattgcttcactttaaaatcctgaaaatgttgtattttctctcttccctttcaattgtatttgcaaagcagtgagttttttgggaggaggcaaggtgcatttttttttccttatagcacggtgtcaaaggcattctataacaccagttcacacaggcaagattctgttttgaaaacaagtttagttaggccaattttctaagttatcataggttatttcttttttctttttctttttttgccgggtgttttaacactgcatatcttgggttgccatttttccaacttcctttaacaactttccagcttgccatcacctaaacccaaaaccaatgacccatatttcaggtttttgtaatggcagccctacttctgtgtaccaatttctgtattagcttttgctgcagtaactagcaattctcaaatctccatggcttccaacaacaaacacttatttttcacttaagaatcctgcgagtcagctgcagctctgccgagcttggctgtgttctccacgtctcctcatgccaggctgaggctgaatgagcagctgccatctgggccctgctcttctcatgctggagggcaggagctccggaggggaagcgggaacccccaggatctcataaagcctctgctgggacctggcagccgtcccctcctcccacaagtcatatggcaagcccaaggttaatggggtgagcctgtacccttcacctcctggcaagtcacgatgaggagagggcagagacaaatcattttgaacaagtgatacagtctctcacaggcatagattccaaaaagaaacccaggagagagtcaccatgcctcaaatcaagaacagccatattgcatttctatcaaggcagaagcacaggtgtgacagtgtgacaatgaaccctgagaccggaggccctccagtccaggtggacatccagctatgcagccagctcagtgcagccgaaagaacctgggaggcagtccggaaagctgagttcctcttacccgtatccctgcagcaagccactttccctctgtggatctcaagttcctcttcaatattaaccaagagttaagcagaatcgtgggttgctttcgaggatgccgttctgatctctgccagcgcacttcacatggcagggaacaggctgccttcccaggaggccgagctgcagtagaaggagcatgagtttaggaatcaggccaatttgagcgggaagcccaggcagccgtttaccaggtgtgggtccatcatataccctctgactctgtttcctcatctgtgaagtgaacatcacagcatctaactctcagggctgtgggtaggataattattttatacagtgccttttgctaggaaattttttgttgtgttgagtcaaaatctgatcccttaaccagtgaactccggccccggttctgcctctgcctggggcagcaaaacagtgattaggaatatgggcacgggggtcatcccacctgggtctgaatcgcactgtctgctcctggtcaggatggccggggggaggatccttaatgcccccgcggttggcttgctatgcttatctgtaaatgagctactgataatatcaacttcatagttttgttgtggggataaatgagccggtgcatgcaaactcaagtagctgttattatttcagttggcagctcctcaggtacctgagcctgctttccataccttctgggtcatcccgtatttcttcagggtaagcaacctcacatttctccagcattctgtagatgtcaagctttctgcaatcctcccccgtctagctgtcctcttgagaatctccttcaggagctctggttaagagataaagaaacagtgagggcattcgagttcattatcccagccacgatggcattctagatgtctccacagacattcaggatctgcccagggtcccacatctgtctcttctccacatcttaccctgccttctccaggtgatggtgatttcgtgatcccagtcacctgcccccaccctcaccttatctgaccctggctcctgggccacccacttgccacttggaatatttattgtctaactgattttccagtattaaggattttacaggtttacactggaattagaagttcatctgaactgcctgtgatgtccctgctggtttcccaatggccaggcactgcagagatgtataagatacgagaatacagtcacctaaagacatgggaagttttgtaagcaatgtctcccgagattccccattctaaatatggcaaggagtgttttaagtacttcatgcttgaagcttttcatgcatttccatcgttgcagttggaccagttttaaaatatatatatcataaataatcttcagaacattttaatgtactaccgatggtattaaaagtcaaagctttcacaaaatttaatttacttctccctgtaacttaagaacagttttaaaatgtgcatggctcctgctaaatttaacagcttccccttttgccttctcgactggaggctgcaacaacctgagccaggaggtctggcgactacaatgtttgagtgaagctgtgagatccatgcctgtactggaagctcctgacagcctctgcagggccttggtgccaggctccgggggtggtgggggagtgggctttccttcttagaaagcctctaggctttgcaggttcaggaagaagctcaccagctgggtccagccactgaaaggaaccctgagcctcagtttgcagcccagagatgctccggggtctcgcccagtgcatattcctggagagctacaacatcagggcatcagatccacagaagatacatgtgcttcactatacaccaggtgtgtattgaaactaaagcagagtaatactattttttcttttttttttttttttttgagacggagtctcactctgtccccccggttggagtgcagtgatgcaatctcggttcactgcaacctctgcctcccaagtttaagcgatttgtacttcagcctcccgagtagctggtggcacgtgccaccatgcctggctaattttttgtgtcttttagtagagaaggggtttcaccatgtcggccaactcctgacctcaggtgatctgcctgctttggcctcctgaagtgctgggattacaggtgtgagccactgagccctgccaagactctcatttcctaactcttgattaccagcgtgtctctaatgtacattttactgattcattcctctaaaaatattgttgcttttactcaatatggtaaaagtttctattatagggtaagaagaatagcacaaaatattcaccaggcatggaggatatcattgcagttcaagaaagaaatcataagtagtaattaaggggcttggtacccatagagtcatctcatcatcactgtaataaatcattcttatatttatttattggagcctgaggatgttaaacccttacttttgtatgaccattcatagcttattggtgctttcatctttatagaaacacattagagtctggctgcctcagggcccattccctagtcacttccagccagacatccatgtatcaaagctctagccaatcaacatgtagtggacgtctgctaagtagggcttccaaggatgttttctgtttagaataaaaagggggaaatgtggctagccacatttgaccactatcccttcttctggaacatggatgtaaagctggagacagtgtagccatctcgtgaccacgaagcagtgatgaggaagacaagaagcaactcacggaaggacccatgccccctttctctttccactccgctgtcctgaggcttcttcttcttcctcttcttttcaagttgcgtaaagtggatacttagatccctgaagtcagacctttcttcttttctagtgtaagtgcttgatgccatcagtatccccaggcactgctttaggctcatctccccatttttatgttgggtcttcattttctttcatgacaaaatatcttctaattccctttgcattttctcctttcacccatggattatttataagtgtgttgttaagttctaactctttggcgattttccagataactttctgttactgatttctgatttaattctgcggtggccagaaaacatactctgcatgatttcaatccttttaaatttattgagatttgttttatggcccagaatatcttggcatatgttctgtgtgcacttaaaaagaatttgtattttgctgttgttgggtggagtgttctgtaaatatcaattaggtcaagctggttgatagtcccgttcaagtcttctgtttactgattttctaagttttaaagacattttaaaaaatgaaaaacgaaatgtttatatatttactcacatattgaccatttctgctgttctttatcccctgtgtacattcagcttttggtttggcatcttccttctccctgaaggcatgtccttaatacttcttgaagtgctggcctgatggtttaaattccacccagtgccctatgcatgagcgctggtaggagcacaccctcttcctggccttgtgtgggctgtcaggattatgttgcctcctcctgttatttcctggccttggtagtttccttacctgtatgcacagatcaacactcagcaaaagaccctgaagctctgtctgccacagctgcctcttctgtggcatttttctccactagctttagcctcctgggcctccgcagactctaaactctggcttgttaactcagcaagcccactgggatctgtctggcttccctcagcctggattgggaactctttcaaggcagcgagctggacactcttttgttttccttcacccaggaatcactgtcccgtgctgccggtggtccagtgtcagaaatcgctgcttcacatattttgtctggttttcaagctgtttaaggtgggggaataaatctgattcctgttactgtatcatggctgaaagcaaaagtcctcttcacctacttaaaaaaacttaattgtagcaaaatatacatgtattagtttgttttcacactgctataaataactacctgagactgggtaatttataaagagaagaggtagaattgactcacagtcctgcatggctggggaggcctcaggaaagttacaatcatggcagaagggtgaaggggaagaaggcatgtcttacatggcatcaggagagagagagcagaggggaagaactgcacacttaccaaacaaccagatttcgtgagaattctatcatgaaagcagcaagagggaaattcaccccttaattcaatcacctcccactaggccactgccacaacacatggggattacaacttgagatgacatttgggaggggaccagagccaaaccatatcaatacataacataaaatttagcatcttctccattttaagtctcccgttcagtaagaagtattatgcacattaacatttctgcacactcatcaccatcatgcatttccagaacatttccagcttgctcaactggaagctctttccccatcaaacaatgattctcattctccccttccccagcccctggcacccaccattgtacttcctgtctccttgaattctactactctagaggcctcatataagtggagacacacagtgtctgcccttttgtgtgtgacttatctcagcataatgtctttgaggctatccatattgtagtatgtgttggaatttccttcttttttaaggtaaaataatatgaccttatatgtatagaccatattatgtctttcctttcatgtgacggacacttgggctgctcccccttgtggctgttatgaacagtgctcccatttgccacgttcttcttaatgttcaacaactttgttaaaattatttaaatgcaatgatagtcatctcaccatgtagttcaacttgtttttacagctgtgtgtgtgtgtgtgtgtgttataatgggaagaagatgaaataaatggttatagttaatttgggaactttgatcaaatcccctttctttccatattcctttccttttttcttttcttaaatttcccttttcttatcttttctctcatcttttactcttctctttgctctttcttttctctcactcttttcttctcctttccttttctgctcttattccatttcttgccctcctttccttccatgtgtgcacagtacactgacccaggaagccgccgtgtgcacacacaccccaatcaacatgactgaggtgctacggtattagcatgaagcaactcatattccaggggcagagagaagatgtgaacatccatgaatgtaacctgagttgaagtggcctgaatagaagaacagaagtgcagatacggtgctttaattactcagtgacagaggttatttttggttagggagaatctggaaagtcttcattgtagggccgacagttgacctgaaacctgagagtcgggcacagttggggtttccaacaggtgcaaagattttctaggttacagaaccactagagcaaaaagcgcagacatgggacaagcctgctgtccggtacaatgtcacatcatgatgccattcagacctcttttcccaaagattctaactagcttttttaaactttacagtgatatacagaaaatgataaatacaagtcatcattaaaatggaacaatgaaaattactcacttttcatgcactttgcccttttctgattggttttagactcggtacattgcaaatatttttccaattttatcatttgtcttttgtgttttacatcctgttgtccttaaggaaataactgcaacaaaagagcagcatctcaggaattctcactgatgaaaatgagtcatccgaattaacaaaaagtttgaattactaacttattaatagaattttggttttattatgtcacgccccttgtgtcatccttgattgccaaactaagtcttagtaattagagctcgttgggaacgtgttttaataaatagatggtgattgtttcatttttaagtgccaagaagttcattctttactaggctaaattcatctgtaacatcttatgttgttaatcagtttaaggaaatattttacctttaaataaatgtatttttagcctaatttgtaaacaaattatcataaattctaagttaatggtttcccaattctatagtaaggtgaaacagtccatatctacctcattttattatcgtatcagctcaattttaggcctccttttggtttccatttaagtcatgagaaatttactaaaatatcatatttcctgtgatcctgtcagtcttactggtgactttaagtgaaacaatgtgtgagaattgtctttggaaagcaaagttgttcaccctccctgatctgctgttgaggaacctccatgctcttcttaatatatgagtatgtatcaccctcagtctccctacagaaatattgcgctttaacacttccactttttccatgacacatctgtccttgcccctccttggcttggagttctttcatatctccccatcatctacaggctaaagtctgtttgagagcagaactttgtagccaaaaggcccatttaaatcctatgtctaccacgtgagatgcaacttacaggataatcactcattttctctcggcatcagcttccttgtctaggaagggggagcagtgtggctgccctacagcattggtgggaagactaatgagaaaaggctcagaaagtcctcagctgtccccgggtgcagagtgggccctcccgaggtggcacactgccttgacctcctgagcagtggacaggttcctcctccctcccaggcctgctcagccaggtccaagctgcaccagctccacaggcacgcctgccacgcagccccgtggaagcacctcctctgtcggccatcagcatgtgggccatgctgcatctctctccccagatgtccttgcccaccctcagatatctccacgcatccctgaaggctgacactcctctatagggggcgttaccaggcccctgccaccccaggcacactgagaagtgctttgtccctgcttcccggacctggcacacagctctgctgcaggcattgtgtggaaatcacagttcttacctcacacattcccttgaccgcatgcattttaaagcatttgaatgaatttttaaaaattctaactgtgaaatatttcagccatgtggaaagctgtaatcggataccagtgtatgacactaacatttaacaaatacgaacattttaaagagaaagcagttttacaaaaaaacctaaccctcctcccagtttcctctttgctgaagaaaccatgaacctgaagttggtgctactccttctaatctgtgtctttatattttattacatattttcatccccataattctctggaatagcatttgtatatttttaaaatttacataaatattttcacctttaaagtggttcccctcaaatatttaacacgcgtaattgaacagagtctaaaatttaccaacatgttctgcctgaacaggcttcaatttctcttgcatcgttcatgttttgtggtccgctgtttaggttttatctggtttttcatccccaggttggttataataacaacacaacgtcattttttcctgtttggtgctgatttagcctttccagtgtgtttaactcatcattgcttctctcgtcctgcccatccttcttggcttcatatccttatagaatttctccttcagaaatcatttcccactggaaggctggaaatagctttatttaccctccctctctttttctcccacctttattttggaagatttcaacctgcagaaatgtaaggtgaattaactgaatacctgacacccttcacctagattcacccaccatgagcatttggccgcttcgagtcccctctctccccctctccatttccctcccctctttccctctttgcatgctctgtcacacactcgttttagactgacacatttgcagatttgttgcagacattcctccctaatactccagcgatcttcaacataaccaccataaaatcattgctcttgaaaatttcgcattgatttatgtgtagttctgttatctaatatatcattcaaattcaaatgtgcctaattgtagcaaaaaaaaagacctttatggcttttctttttcaattctagcgtccaattaaggattatttactgtctttagtaaaaacatctccttacccataatctaatcgttccctggcctttcattttttctcaacattgacatctttgaaaactccagaccagttgtttggcagaatgtccttcagtcttgaatttggctgactgtgtattctttgtcagattcaagttaactgtctttttttttcttttttctttttttttcccgacagagtcttgctctgtcaccaagctggagtgtggtggcacgatctcagctcactgcaacctccgcctcccgggttcaagcgattctcctgcctcagcctcccgagtagctgggactacaggcatgtgccaccacgcccggttaattttttgtttttttaatagagacggggtttcaccgtgctagccaggatggtctcgatctcttgaccttgtaatctgcctgccttggcctcccaaagtgctgggattacaggtatgagccaagttaactatcgtaatgaccccatgtccttgtcagtgcaccacatcagaggccacctgatgtcaacttgtcccattattgattattttgagtgtgattattaagctaaatggggaccaacaggtttgtccaaagggaaaggtgcatttttcctttgtgagttatcaataatctgtgtggtaataccttgaaactatgggactattctgtttcttaacactctttactcactcacgggtgactcttgcctcagtcaactattaccacgatgtttgtgtcctaacttctaccatcctttgtgtgtttattaggttagtcttcttctgtaaggaactccttttccttcttcacatttccattcctttttttaggaagggactcttgttctttgtgttaattgaatatgttataatatcccgttactcatttaggtgttaacattgtttcagatttggctgctgggcatggtttcagagtatctcctctatcttttccggatgttctcctctgtctttgagtgtgtctcactttctagcacaacaagctgctccaggctcacctgtatttttcctgccccagccctggaatcagccattgctccaagaagctttggtgcctttgagtgcaatatgatatttacgaaccaagatctggctgctaagtgtgcttattacttccttggtgttcttactcccagactcttcagtggctagaaatgtgcgcgtgtgcatgtgtgtgtgtgtattttaaatcatgagtttacgctgacatctctaattccagttcatcatcacagggttcttcctctcctcccattccatgtttgtgtctcccttctcccacaataagaaccctgattccccatcacattaatgtatttacccacttattcaatcctacaattcacacaaaattgtttttggaattgctataccgatactactgctcactacaaattcagtaagagagatttaatatttccttctggttcttcttgtgcctggaagatgtctcattaagggttacagtcagatattgagttctaaactttcttgccttaatttttttttcctcttccatttgttatattacctatttgatgtatagctaggtttactggtttctttgtaggaaaactttcctgtgtcttaattgaataatatatttgtggatatataaactgttagtatagttcaaaagtctaaattacatgaaaagatgtggtcagagaagcctcatcgccttccctgtccatgccttgtactccattctcaacaatgcttcataaagagctgttttcaaagttcctggtatatcctttctatgttttattgtttgctagtttttgtttgttttgctgaaataagaatatagcacagaatgacagaaaaaattgcaaaccatatatctggtaaaggtcattgtccataacacataaagaatttttaccactcaacaataaaaagacaaatggcctaattttaaaatggacaaaggattttaataggcatttttccaaagaagataaaaaaaacgggcaataaacacctgagaaaatgcttaacataattagccatcagggaaatgcaaatcaataccacagtggggtacctctttactctcactaggatgacaggttttttagtttgtttgtttgtggttttgttttttgttttgtttttttttttttgagacagacgagactccgtcgctcaggctagagtgcagtggtgtaatctcggctcactgcaagctccacctcccgggttcactccattctcctgcctcagcctcccgagtagctgggactacaggtgcccgccaccatggccggctaattttttgtgtttttagtagagacgaggtttcaccgtgttagccaggatggtctcgatcatctgctgaccttgtgatccgcccacctcggcctcccaaagtgcttggattacaggcacgagccaccgcgcccggccgacagtttttttcttaatggaaaattggaagtgttggcaagaagtagatacattttaacccttatacattgtttataggattgtaaaagggtacagctgctgtggaaaagagtttggcatttcctcaaaaagttaaatacagagttactatatgacctagcaataccactcctaggtatgtatgcaagagaactgaaagcatatgttcactcaaaaaatggtacacacatgttttttagcactcatgaaatactgctatgtggtatgtgatggtttggatgtttgtcccttccaagcctcaagttgaaatttgatctcccgtgttggaggtggggcctcatgggaggtgtttgggtcacggaagtgggtccctcatgaacagattagtactctcccttgggagtgagttcttgccctattggttcctgagagagctggttgttaaaaaagagccttgcacctcctagactctgtcttgctttctctctggccatgtaatcttcgcacacgagacaccccttccccttccaccatgagtggaagcagcctgaggccctcaccacatgcagacgtccaatcttgaacttcccagccatcagaattgtgagccaactacacctcttttctttataaaccacccagtctcaggtattctgttaaagtaacacaaaacagactgagatgtggtacaagatagatgaaccttgaaaacattatgctgagtgaaagaagctagacacaaagacccacatactgcatgaatcagtttatatgaaatgtgcaaaatacacaaatctatagagacagaaagtagagtagtagttcccaggggctgtggggagaggggcaatggaaagtgagtgctgaagagtataggatttccttttggagtggaaaaaatactctggaactaggaagtgctacacaacctggtgaatataatataatataaatattctgtaatgaaactagcctggtgcagtgactcacacctgtaatgcactttgggaggctgaggtgggaggatcgcttgagtccaggagttcaagagcagcctgagcagcagggcaagaccctgtctctacaagaaatgtataaaaattagcagacatggtggtgcacacttgtagtcacagctactcagaaggctgatgtggaggatggcttcagcccggaagatcaaggctgcagtgggctacgataacaccacttcactccagcctgagagacagagtgaaaccatgtatctaaaaaaaattaataataggccgggcacggtggctcacgcctgtaatcccagcactttgggaggcctaggaggggggatcacaaggtcaggagatcgagaccatcctggagaacacaatagaatcccgtctctactgaaaatacaaaagattagccgggtgtggtggtgggcgcctgtagtcccagctactcgggagactgaggcaggagaatggcgtgaacccgggaggtggagctttcagtgagtggagatcgcgccactgcactccagcctgggtgacagagcgagactccgtctcaaaaaaaaaaaaaaaaataataataataaaacctacttatctgtgtattttacagtcgtaacttttatgatatatgaattatatctcaataaaaatacaatcatttttaaagtataatcagcaccttttttttttccaattcatatcctggaaatcagcccacatcagttcatagataacttcaccattttttttattttttaaatagctactacgtgtttgttataccacggtttattctgtcagtctcctatatggacatttaaacgactttcactatttttctattataagtaatgccgcaatgaatatttgtgcattatttttgtatcactggaggtaatgttactctcattcttgaatgatagtctggatgtatataaaactctaggttgatatttcactttctttcaatcctttgacacttttgttacattttattttaggctttttatttttctggtaagaaatctgctttcagtataattattctattgtggataatctttccctatggtttttagggttgttttttccttatctttgctgtctacagtttcactaggtagttattttctcctgtttaagaatcattatgtttcttgtttctttagaatcatgtcctttatcaattccaaagttttttttttagaggaacgttcttgctctgttgtccaggctggagtgcagtggcacaatcactcactgtaaccccgaactcctgggttcaagcaatcttctagactcagcctcctgagtagcaaggaccacaaacacatgccactatccctggctaattaaaaaaaaaaatgtggagataagtgtcttgctatgttgcccaggctggtcttgaactcttggcctcaagcgatcctcccacctcagcctcccaaagtgctgagattgcaggtatgagccactgtacctggcctcagtttcaaaattcttagccttattttttctgaatatttctttttttcacttgttttggtctccttctagaactccgatttaagcatatttgcatcttctcattttgccttattttctcttcccattcatcgtttctgtctctctttgctacattctggaaactttcctcaatctctttttcattcagttattttctctttagctttgtcttacctgatgtttgtcctcacctttgagtttttaattccaatgactatatttttcatttgtgtttccatttgctactcttcaaatccaccttttcatcgtgttctattattttgttagaactttaattattttatgtttaatcatttttaacttattttgtagtgtctcccaaattattgtagtaagttcaggggtggaaattctgtttcagaacatactaatctttacaatggtggctgtatgcgtatgtgtgtgtgtgtgtgtgagagagagagagagacagagagcgcgcgagtgcaggagctcatcttcattaattgttacattcatggaacgctcatgctccctgaactgtgccttaccatcaaatggtttcacctctgcttgtgctattgtcctgctggtttcaatggtttagagctggtttaaattaatttttcagattaaggagccctccaagacacaggtagcatttcagtgtcttttttttttttttttttttttttttttgagacagagtcttgttctgtcgcccaggctggagtgcagtggcaagatctcggctcactgcaacctctgcctcccaggttcaagcaattatcctgcctcagcctcctgagtagctgggactacaggtgcacgccaccatgtccagctaagtttttgtattttttagtagagacggggtttcaccatgttgcctaggctggtcgcaaactcctgagctcaggcaatccgcccacctcggcctcccgaagtgctgggatggcaggcatgagccaccgtaccctgcctctgtgtcttttttgatctcctttctagcgcatgctgtcttcttttctccatcaagcttaccttttcatttaaaatttccttcttatatttcacctagaatcttacgtccttgtagcaggaatagggtctgagccagtgtattctaatatgttgctaaaatcagatatatttaaatatattctctctttttttattatgaagatttgtctctatctgtaaaacttaaaacttgccattttagccatgcaacttagtagcattaattacatgcacattgttgtgtaaacatcctgcatatctatttcaaaaatgttttatcacccaaacagaagctctgtacctattaactcctctattcccacctcccctttcgccactggtagctgcttttctgcctagtgtctctgtgaatttgcatattcgaaatatttcacatattcgtccttttgtgtctggcttattttacttaccgtaatgtttgtaaggattgtctacattgtagcatgtgtcaaaaactcattgctttttgtggctgaacactatttcattatctgacataccacactctatgtatccacttgcccgttcatgtacatataggttgtttctgcctattggctcttgtgaataatgctgcagtgaacattcgtgtacaagtatctgttcgagtctctatgttcagttccctgggatatatccctaagagtgcgattactgaatcttatagcaactttgcgtttttaaaacagactcttaccaaaatgaaataaatcacaaaggtgtagcaccgcaacagcagaggtggtgagggtcttacatcatccctcatctgtttaggttaacatatatgatattcaaaattaagagcaaactgcttagtcctagaactgcccagttcttgtttcttattgctcagctgtgtacaccatgtctacccagtgtgagtttcagtggaactagaatactttgattgagcaagggcttgtgtgtgtattgtttacttttaaaaacattgtttcaagagggttttttgttgttgttgttggcttggggcttgggggtgatactgaaccaatactcattcctgctttgatacattgtttcctgagccttctcatctcttctctgcggcttagctttcattatttaacaaacatttattgagtgcccgtaatgtgctggcttctgtgatacacacagagaaaattaaccctggagtaacgtgctgagggctgcggtacaggaaagcacagaatgggccgtgcgcataacccggatgagcgccttgtgtcccgctcactttgcgcgttgggctgcaaacagtgaacactcactgaagttctgtcatgggatggaaaattcattgcacaaatgcaagtggaagcagggagggcaggattcttgggaatgacgccagatccaggagacgatcagcttggtctcattccccaccacgaacctcgtgtcccgacagcgtcgacacatcccttcatacacggctggccagatgctcacccgcagtccactcagcggtccactcagctgcgtccaggattgctgggtcatttggaaactgcatagagattcataggcagcttcccctaaaaagggtgatattctgatgcttagcccatctggtacagccaccattcatctcttccttccttcctttaaatattccgcaagtactcatctcaacctcttctcacacctaagcctatcctgataattgtcttttcctccaaatcctctttaatatatttttcatgtcaaaggggaaatcatcttcttttgtaagagaatacatgataaatttattttccctgtgtctcccggatgtctagagcgggagtcaggaaaaggaagcatttttggggggacttaggaggaaagaattcatttttttttttttttggtaccttagaatacagagacagtgatccacattagaaaggtatgggttggactctcctacttccctaggatgtttcttctaccagtgtgggtgacactggagttggggtgggccatcaggagatggaggtgagcctgccccggatggctgccccctgctcaagtgagccagggtgggaggagatgaggaagacagcccctctggctgtgccttttggcccccttttctctcagttgccctaaaagttatttattcctggagttggctttagaaataaataggaagtatcttggcataagtcagagaagggtccaaggcagaccatcttcagacgcagtgagaccctcatcctctactccatcatacacctgttttccattacggagttctgctgtcctctagttcagctctgctctccagcaggctctctcgggtggtgaccagatggccgccaataactccagacttaaatcctgcctgggctgcggggcggacaccccatctactgtgcaggcactgctgttggctcctgtggagcagctgtggagcaggggtgggtggagtagcctctgcccatcctgagggacctcctccgtcctccagttgtggcctctgctcaggttcatatggccacacagcaacactgtctaccttttatgcttctgctgatccctacctctcccaaagacagtaagctcgggaaaaggggacagtgacggtgttagtgaccccaccacacccactacagtgttgagcactcatcacatgtgtgtccgtggagctggcctatatgcgctctccagtatgaggctgtattatgtctaaggatacacaaatacacggctttaaagtaggaatattttttaatttactacaaagaagctcagggattaaagaaccatccgtctcttaattctcatggtcgatggctttatctttttgcatagcgtgcttgcctaaagcgaggcacctcttcatatataaatcagcctttttttgaataaaagttaaatacaacaggatggaaatgcagctttgaaaacctataatgagcaggagggattattatgcatctacaccccggggaagtgaatatttcatgttagaaaaagtagaggccaagggcaaggttcatttaaaatgtataaagataataaaagcgctcatggatggaaaggccatctgaaaggactgttcactttttggagaggctgatgtggaatcattgtgtttctttgcagggggaaaaagaaaaagtcctgtgtgcgaatggccccctgcgtggtgctgcgtcagcagacaggagcattattttcccctggaatgtgcagcgcttggtgcctctgttctctctgtagtgcacagagccaagcagagagagaggctgagcgtttcaaagagagacaaaacaaaaacagattattctgctgtgctgccacatcaccacagcacaatactctgttcaaaattgtctcttgtcaggcacattcttcaaacagtattatgtgtacaaagactctctgtgttggagaatttgcatgtgtagggaaaatagctgcatagtgcggaatatttcctgaagaggccagatttctgtgtgtgtatgtgtgtgccgggcatctgtgtccttagcattttggaaggtgcctgagctttcggaggtcaccaaaaagtactgagtcatcgtgccattcggttaccttcggcgctaccatcctagtctgaagcttttacaggcctctaagaaggtcttcctgagaccccagtcttgttttttgcataagtacgctgcccaggctccggtgattgacaggtgtagaatgggacgtcctcctttcccagttgcatgatacatagtgttcagtgttaatttctggaattcaggtcacttgaaaggccaattcttgggcctttctgcctgaatggctgatgattcctctccttgcatccctcgtgatcaattatccagaaaaactgattattcagattgttaaatccccagttagtccggataatcggcattctgttgtatcccataaatgtggcccacgctgtggagcagggtgggcctcttcctggggccctgtggctcctctctccccaagctcaggcgtgctgctctgtctcccgctgcctgctcttctgggcattccgctctcctccagcgccactgatgcacagcctttccaagagggtggccttgcctctgggtcagctctccattttggggggactagggtggcccggctggaggcctctgcagtctttgtaactgggacaaaagttgaaaggacacataaaaaaaattacagataaacctgaaggcacatgtgctcacatggctgctgtggctgtgggattgttccttctgcctgtgaaatggctgaatttaaaacccatgcttctttgtcctctagatcctgtacccccactttaggaaggggcagcaatcagaattaggcagcctactgtctttgttggggggctgtaacaaagtgccatagacagagtggcttgtcagcaacagaaacttactgctcacagttctggaggctgtgaagtccaagaccaaggcaccagcacattcggtgtctggtgagggctcatttcttggtttgctgtgtcctcacatggcggaaagggcagacgggcttcctcaggctacctgaggaagggcactaatcccattcacaagggctctgccctcctgatccattctcctccccagagctccacctcttaatgctatgaccttgggtagcaggtttcaacatatgaattttgggaggacacattcaaaccacatcacctgcccaaggtcttacagccggtggtagcccaggccagccatctctttactgtacccattttgtctctagttctgtattaggtgttggaggagggaggtcacacagatgtgaaaatgagtcagctgaacaaggagcaggccctgccctggaggagcttaaggggaaattataaatttccctcagtagtgaatcatgctataatctagtgcagggtgcaaatatgtgacctgagggagctggataaagtactcaccttgctgtggagacgtttgacttgcacctggaaggatgactcagagcagagatgaggtgggggagggcattctagggaaggggccaacttgagcaagagcttgtaggtgcgggggcgtgcagggcaagggggccctgttcacttagaacaaaggatcggccaaggaagtctgggaaacaaaccaaactacagaggagcttgagcagagtcgaagtttattttgttccctcgttgaaggtttaaagccgaggagctacgtgatgagcgctgtgttttaggaagaggactccgtaatagagaggatgagccagtggatccatttctaaatgtgtttcttaggctataggaggaggagctttctttatttattccaaaatttgctttcagatgctaatgcgtgtattgtgaactctgagaagagagagttccaaaatgtatttgaccacaaaacctctttttcacggtaactggtgcacagtaggcactcagtgtttttgcatgaccaaataagcaagtacaacaccagcgtgccacagagtgtggttcaagaaacattgcattctgtgaggcgctgaagcaagaagaaaggccagtgagaggctttgatatttatccggggaagaggtactgattgctcaagctaagcttcagtggactgaagatagggaagccaaccacccacaactcctccaaatacctccctctcccaggcaggcatggctggggcacccgcttctgggctctcctgccccctgggcccaccccacggatggcttttcatgcatttacttatcattctcctctggcagagaccggcacggtctggcccgtgggggctcaagacagttgacagaaggaagaggaaggagacctaagggacttggcagctgggtggagaagaagacccgatttctttatttatacatggacttgcttgaaaaagatttctagtccttaaccaaaaaaaagtgcagtgacctttccactacgacatctgttcccacgagatgcaagtcacagttttcatgtaagggctcaaagcaaccgtggagggccgaaggcaagcaagatgtggatcaggctcttgtttttctcttctcttcatcttcccctccccttctaaagtgagagcttgtgattaaggagggtttaatgacagggaaaacagttaaaatgaagaaggagttgcctgaaggaagcatctgggaggtgggcagagcaaggggtaccgggggccctgccatgaagccttcagggcatcggtatggaaatgcctccagctcctggctcgcgctaagcgtacctggttctctagatggctcccggtcttcttgcctcctggcccttccctctcccctcctctgacctttctcttacacttatctttttttttttttttttttgagatggagtctcgctctgtcacccaggctggagtgcagtggcacgatctcggctcactgcaacctccgcctcccaggttcacgccattctcctgcctcagccgctcgagtagctgggactacaggcgctcgccacaacgcccagctaattttttgtatttttggtagagatggggtttcactatgttagccaggatggtctcgatctcctgacgtcgtgatccacccgcctcggcctcccaaagtgctgacattacaggcgtgagccaccgtgcccggccctgttacacttatctttattcccctcatccattcttttctctggactatgttagtgctctggtaacatcctttccctcattcaatcccaactctcctaaacccccttgagtatgttcaccagtggtttattgacatccatctattcttgttctctccaagcccagcaaaaataagaaaacatattttggggtagacagatgctgacccctgacaatttctctttgattttcctccacattttctctttattttttgcttcactaacctttaagccagagtaaataaaaatgactggagatgactgatttgccccagattacacattaagttagtggtgatactagcgccagggcccagggctgactctgctataccatactcccttccctgatggtgcctgcttttctgaaagcttcttgccctattataaaggaagaagcatctactccagatgttgaaaaaggtaaggagcggttatgaaggcccagccctggggatagcttagcattttgcatttagtgcaaacccatttgcagcttttcctcatatttggttgaaagcatttgcattatacagttcatttatgcctttatcataattaggtgcaagttgctgctgcaatatgcttgtctgcattattaccgtacttgcctattttcattcctgctcatcctacgttattgtgtcttactgggttcatgtcaaatcttttcaatgtgtataatattctgctttcggaaatcaggagggggcaaagattgttatgtcaaaaattcagagaaaatgaagaaatgtgtgtacatgtgcacatatagagagaaactgcattgaaatcacagcgagattgtggcagaaatgagaaaacctaagattaacggcttagagggtttttatgctcctggaactcagaaatggtatgtttgcagttgctgcacaaacatggtctaattgctgaagctatttttaaaaagcacgctgaaaccatgaagctagggaagttcaaaggcttgctcttgcatgtgctcagtcatctttcccaactcttattgcaaaatgattttttgcttgaggacagagtgttgggtatctgtgacagccacggtgacatgggctgggaggtgtctccagagcagctccagcagatccctgatggcccactgggtaattaaaagctaagtggaatgttgaaaaaacgtccatacaatttgatcggtcaatttgcttgcttttttgagaatttaaatgagaccttcagaatcatttgaacttttaaaaggaaatcatttcaaaagtcgtcgaaagcgagtgtgtttgatgtgtcttaagtgacgggcaagactgaactcattttaggtggttgttgatagtatggatgcagctgtgaaacttgaatcagaatcatgcgccatccttcagtcaactttgtaaggcacatttctcccggaaatcccacaactgttgattattctcttgtacggccgtggaatctgagagctttcaattagcccctaagggcacgagaagttgagggtattttccaaataacagggtctacatgcaaatgacgtggtaggagcaggggtaggatgagccagagaaagctggagcctggcttctgccccattctctccagctcactcgctgtagaaagccagtggctaaaggcccttgttggagccaggggagtctttggtaggagacccctgaagagcatgtaccctgatgtggtttggctgtgtccccacccaaatctcatcttgaattgtagctcccataattcccacgtgttgtgggagggacccgtggggaggtaattgaatcataggggtgggtttttcccatgctgttcttgtggtagtgaacaagtctcatgagatcggatggttttctgaggggtttcccctttcgcttggccctcattctgtgtttcccacctccatgtaagacatccttttgctcttccttcatcttacaccatgatggtggggcctccccagtcatgtggcactgcgagtccattaagcctctttttctttatgaattgcccagtcatgggtgtgtctttattagcagcgtgagaatgagctaatacatacactaaccaagcaccctctgtggctgactccaagttgtcatggaagttgataaagtacccttgagagcttagtaccaagtcacgtgctgactgactgggttttacacgtcctagccaccttccacccagaccactgtatccaaaacctggcctggccacgttttggataactttttacttacttttttatttagtgaactacagtttatttgatcattcttgatcactttattaagcggaaggagatgttaatctctgaaaagtctatccttttacttccctaaaccaaaaagtgactggagcagatctcaatagatgagaagtttattttgtcaaggttgagggcacacccaggaaaaagaaacacaagtcatagtaggatctatggcctgtgctttttccaaagagggtttttggaacttcagtatttagagaaaagaacaagcaagagtagcggggggtgggaaagagggagggagaggaggcaatgaggccagtggtcacattcctgtgaagccctgaccagccctcagtggatctacattttacatgtgaagaaagggaatcagggaaagtcaattatgattctctctctgcttagtaaatctacactttacatgagttaaagtaaacatgtgacatcatagctgtctgtttgggaacaaaaggaaggcagtgttttgcatgactcagttcccagccctaacttcccctttggcacagtgagtttggggtcctgagtttctattttccttgcacacgtcttagtgctgtgatagaaaaggggtttatttgaactcttgccatctttgtcttaaaagatgatggaaagtcaactgtctgtggatgtgataggcaaatcagttgttttaagcaattcttaggtaagatttaacatggcctcaactaattacttaagagacagctaggaattatttctgtttgcctgtactttgcctctgtatgtgtgtgtgtgcattgcatttctagggaaaatattgaatagcagtttcttttttgaataattatgtattagagaaatttagcaatattcttcccaaattctatatactttacattacccttcattttaccttccagctgatagaagagggaaaattgtagattattaattgatagatagatagacagacagattgtcagggagatggatggatggatagatagataatagaggactttagcttatatagcaattcctgatacaggcacagatgcagactcatagtataaagttgcttatcatggcaagtgcctgacatttcaccattttgatgactattctaggcccaaaagctcacagactgggggcaaatcttttccatctaaaaacactcccatcatcccttaacaaactgatgacaacataattgttttctatcaaatgaatcctgaaatagtataaaacatacaaaaattcagtctgtttcatggagcatacaccttcaaaattcttttcaggcttatttttgtcactaaataaaaatcaatcacttgaaagcatacgtctctgatttctatcccttgtcttataggcaggtgtctctatttccaagtcagcattcattatgcacttagctaatatttattgaacctctgtgttctgttggtagttatgagtgtgatgcaggggtggctgggatatcaggtgtcctctttgagggtttctctccagggtagacgggaagcctcattgcatccagggtacagaaaggtgtgacagattccccaagacacgggctgcactttggggcactgtggaactcacaggtgagcccctccctgtgctcaggggcatcaggttgtccttcaggggccagcaggtaaaacggactctgagagcagaggcctgctaagaaggaagtgggggtgtgggcagtcaggaagtcatggcttctgtttgagtaaagcctgatgaaccacactccttacccagggttagaggaacgtctatgggaccagctgtcaaattaaaagcataagtcacacattctatttccagagcccacaaggaggaaaaactgagacttcctagacatgaatttcatttctgacaggcttctctcctgctacatacatgcacattatctacacacatgcacatgtatgtagatagcgtggcaagtgcatgcacacacaattctgcacacacacctcctcctgcactcaaggtttctggtctccatacaaagatgggaagatttggggctcagggattttgatcaaaccctcggtaaagcagaaaccacctctgttgtacttctagttttctgtttcagggcccaagaaagtccatttcaagggccttatgtgtaattcacagttttgttggagtccccttctaggtagacaaaacagaggaacctttcttagactggatctcagttcagccatcccaggggctaccctctcacctcaaactcaacagaagatcaggaatctgggggtagcatgggccacgtgtcttccctctcaacaccgcggtaccctggagcaggggttcccaacccccccagccacagactggtatcggtccatggcctattaggaaccaggctgcacagcagcaggggagcagcgagtgagcaagcaaagcctcatgtgtatttacagctgctcccatcgctggcattaccaccagagctccgccccctgtcagatcagcggctgcattagattctcgtaatagcacgaaccctattgtgagctgtgcccgcgaggcatctaggttacacacgccttatgagaatctaatgcctgatgatctgtccctgtctcccatcacccccggataggaccgtaattgcaggaaaacaagctcaaggctcccactgattctacgtgatggtgagttgtataattatttcattctgtattacaatgtaataatcatagaaataaagggcacaataaatggaatgcacttgaatcatcctgaaaccatccccccgacattggtagaaaaactgtcttctgtgaaaccagtccctgtgccaaaaaggctgggaccactgccctgaagcactcaggagacacctgcatgccactcaggtctctgcaggaaatgacgctggaccggcggttctaccgagagacttcctgtcttagttggccccatttatcctctgacggtttcccacatacatggcttctcacactctattcttctcatggacatattcgtgccacttgcagttccacatttcactgcttttcagattgatgtgttaccggagaattattcttctatctattattattataacattcaccataatcatcattagcccattaactcataactattactatcattgctaatataatgactgttaactaaatatgaataatgtatgctatcactaatataattactattattaactatattccatctcacataatctatctcagctgcttcatctccctctgcctcctttcaccttccccctgcctgatgttacaaactgaacaacttagagttccttgaatattccatgagcccggcttctcccccaggccataatgagggtatgtcagtgtgcagtgcacaattagttcctctgccaaggcaagatctggggtgcatggccggccttgcagcccgtgtgggtgtcccagtcttgctcttgctctttaagtcaggtgtttgcctctgctgctgccatgggaaccatctactgctgcaggtcaggcatcagaaaagttgtgtgtcctgccctacacccgtcaagtgacgacagatgacaattggaggggaaggagaggaggtcagaggaactggagttgcactcgtaccctccctggtgaactgaaagagcaccctccctggtgaactgaaagatagacaatatccataatgtcgaggcattgaccaaaatcttaccacgtgttttgtgctccatagaatctatttcaatggagcaccggctcttagagcgcttaaagattctgctttattaactgactccatgttgctctactgggccctgtggagtagttaacagctgttagcttgaaagaacgtatggttttgttgggaactgtaaggtgtaattaattcattaggacctgctacatgtcagaggctgcgtgagacaccgggctgcactcatacctcacgtctcagacacagacttggacctcagggaggtcacatccctctgaggaagagaccagcaaaacaccaatcagatgtgaccagtggcactggccactagagtaagcacctgggctctggggtcacagcagagggggcaccaccagctctgggaaggctttagggagtggatggcaattagaactttcaggatgaaaggatgtggttcagaggactgggggagagggcagcacagacagacgaagccacgtgcaggggcactgagacagctcaggaatggcggtgagttcacccccaccgggtcgtgtccgggaaaatgatggagagcagcactgaggatcagcaggggaagatcacgctgtgcatcctgagtcttctgggcttcatgctgtgggtcggggtgattcgttgaaagatcttagcctaggggtgttttaggaagatggcacaggctgcagcatgtagaccaatctgaaggaaagatttgcagtcttgcaggtgagatgtcattaggccttggactgagacaggagtggtaagaggggaacatacttgggagtctggggggaaggtcaaggtcaaggtcagcgggatttatgacatggtcatctacggggagaaagagccagggagtagcttctaagactgtgtttctagctggagtgactagaggagtgagggtgatcttttcagagctcaggagtatgtaaggaacagattaaggtgggagggcaggaaaaaagacaaaacagaagttctgcttggattcgttgcattctagctgccaagatggaactatccggaggcaaggcggcacttaaactgcaagctggggctgcaggtggagattcgggagtgactgttttaggattaatttctaatggcctcagataagatgacccagggtaaagggagactatgcagagggggagcagtgagagtgaagaggaggataaataacaatagatggcattgcatgggacataaagtgactgctcggaggttatttacgggaagatggatctcgcaattgagtgctgaagaaggcatttggtaacaactggagccccttctctgtgccaggagcgggcactgaggggcacaagtgattaaataccacccctgccctcaaatgaaagccaacatagaaacagataaactatagatcaagtttgcaattcctagagttgagatataaactaggtactatgggaacacagagctcatttttcttttttattagatgagcaataagtgttaaatgtagaaaaattagaaaatacagagaaacagaaaggacatatatgtaactcataattctacaacccagacatgtggctatgaacattttcattcatgtctcatacaaataaaaaatacattttttagcaaaatgagatcatacagcacacactgttttgtaaacatttttacttcatattttattatttctgtagtattaactatgttatcattttcaataactgcctagtttctttttttagcaaatgtatcataatttattaacctgtctccatcattggacatttagattggttcctggctttcaccacattagacggaatggcaaatattcttgtagctacatatatgcaaacatcaacattatttctttacaataaattcccagaagtggaattgttgtgttacacgatgttctagttaagctctttagctataagaactagacctctcttctctatagacttgctagctccagcttaaaagtagagggaggggatttttatgaacaaaaggaaatgagggaatctaaaggcgccaagaagctgattcctgcaggcctgttgagagactagaaattaaaactccccgggccaggcacggtggctcatgcctgtaatcccagcactttgggaggccgaggcaggaggatcacttgagcccaggagctcaagagcagcctgggcaatattaccagaccccatctctataaaaataaaaaaaatcaggtggacatggtggtgcgtgcctgtggtcccagcttcttgggaggctgaggtgggaggatcacctgagcccaggaggtcaaggctgtggtgaaccgagatcacaccagtgcactccagcctgggcaacagagttaggccctgtctccaaaataagtaaataagcaatgaagctccctggattccagcccctgttactcaggagccgcagggcctctcacccatgctcctctgtgcctctctgccacccttctcttctttaccagcctggtttgcttacttcttttgccataagactcaattttatgtcatggcccctcagcttcagtggctgacggtagtctctgccttttagttaagacgccggagaaggtgagtctgattggcagattcccaccagtcctgagttctggccagctaagctcgggcagccatggatctgggggctgggagcaggattcagtcgggatgtgctggagcccacttaccccagctagtgagagctgaccctgggcacctcctcccagctccaagttcactgacgtcatattgggagcttgaaatcggctgtgccggatttacttacagcaagaaaaccagtaagtgctgagtcagggctggtcgtgagatgttcctccgaataccactgggtgtcacatggaacaaaactctctgactccttgagaaatgagtatggccagtgactgacatctttagaatatttctgaaacaatgtaatctcattaacattccgtagatgttacttcattctgttattgtgtttaatgtcccagagaagaaatctagttttgggattttcatttcttttctttagattgatatgttgttttatctgtctgcactcttgtcagtttgatttgcttacaaagcgtgcacgttttactgggctgcaactgtggtggggcgctccctttgctggttctcagtaagtccattttatttgaagatgcaaatctttttccaagtcggggaagtttttccacgttgttaatttgattaatgtgtttctttcacttacagtgtattcaccttctggaattcctactgtgcttatatttgatcttttgggtcaatcttccattttgcttatcttttcctcatcatagctaacttaatctattttctttgaattctggagaaaactcttgattccagccaggttcactgatttgattgtatgcactatccagtctgttctttcgagcttctgttgcattgttaattttggcaattgtattctcatctgaaagtagtcttttctgatctcagatgattccattttcatatttacagtgtgttattgactcctctcaatgagttatttgattcagattctctggttgatctcaagcagtgtaattcagaaatttcttaaatgttctgtttcataagggtgatatttctttatgttctttaaattgatcccattattatggacttttttttttattatgagctttattatcagggctacttcacttttattttgccacattaatgaatgtgcaggctgtattgagagcctacagttcactgcaattgaatgaagggaggtttgttacggggctaaaggaattcctttccctgtttgttttaataatcgagaagttgcccgggctctactcttctctcaccagcacttagtgtgctcaagaggttctctcaatggagcccgggactggcagtgtgggcatcccctgagtacctgccagaaatgcccggtccagaggcaccagctcagaaactctggtatggggcctgggaatgtgtgtcttcacaagtcctccaggttggtgccatcaaagtttgggaagtgcctatttgctcaccactgggcttccagccacagcaagggtgagccaggtccaagttcacgtttagtcccctcatggcaacatctgtgcactttcacgaggcatttgcagatttgcccagcctgtacctcagccctcaagctgctcctacccggaattctgacctctgtggagtttgcagggttcctcaggggttcctttcacttcgtgtccaggtggacttgtcttttgcgggtggggaatttcaggttgggcagcctctcccttagacagggcttgctcatgctgtcctgcaggagctccagtgtgggtggtcgtgattttgattctcagcagaaatgcagactatttccctactattttttctttggatatttctatagagatttaggaagaggtgcagaatgggaggctcaaatcacctggaggcagaaattcctctttttttttttttggatgacctaagggagatttacagagtaaaggggacgctgttgtaaccatccaggtggggatgaggagggtctggcattggggatggggaaaaggtggactcctgagtatttctgagatccagtggatcagcctgaggagcagttgcgtggaaggagaggatgagttaggatggctcagttcattcagttacagtgaactgtaggctctcattttctagcgcagctgccctgatgacttcttggaagacatcaaattgtgtttgacttgggcagaaggatggcactggatgagtgaatggatggggtggccattcccaaccacagctgagcacgtcgtggtgacggggtgtgatctcccccacccctgctgcacccagagctgtcctggtcacatgcacattcactgtcagacgacaaacagggagaatgaccgatgctgccaggaattctgtttgggtctcgtacgttatcatctgttaccagtgacagtagtgtttgggacatttcgccagcttcccggagaaacagccctttttcctcggcctcccggcacctgcagtccgtccgtagctttcccacaacccatccctcagagagttctggcatgctaattttcaggtttaccaagtggcatgaaagatactaatgaatttctttacccgtcgccctcctcctagctgtcatagctcttcccacttgaagtgtttgttttccttgttcctgtgtgtgtgtgacagaggtgaggggtctgctgccttcatggtggacgactcacttgtctggtgcttcaagcctggggtctgccttcctaataatggccactgtcattttcccccagctggaggcctgaggacatcagcttaagcctctccagggctctgggacctgcaaggtccagactcttaatgtgattcttgacaactgatttgtcagctcattttccccttttctcaatgtcctgttgtagctcagtctgtctgcttgtcctcagcgtgtaataaaacaaccccagacaccccactccaggaaccagggccccagagctgtcccacagcctagtttaggactgaagccccagatggcaccccctgccattgggaactctaaggagactgaacaggaagaaacacagagcacatcttccaggaagaacctttgataagctgagaactctttgccctttatttaaaaagtaaaaagaagcgaggaggagaagctgcgtagaagccctgccctctgagtttgcttagaaaaagcacattcaagtttgcatttaggaatcgcagtcagtgacgcatgcttgggttccctgctcaagctgttagggcaaaagcgacggcgtttctaccctcatcaggagagactgcctctatgaatctctcgtcgccaaactaagcagttttaatccagatacagagtggagacagatgaacgcatgcaggatgcttctccagagacggcgtgttctcgctgttgtcagccatccagacagggtgctcagagggcagccttggggcaccctgcagtgggcaggcagcatgaggcacacggatccttccttctcttttcagctgaagaaatgctaaagagaagtttgtaaaattcagagcctcatctcagagggaaagatgagttaatgatctgctgcagaaggacttggcaggtgcgtgctccagccggctgagaagacacccacgcagccctcccaccatgctgaaaaacatagggtcagccattggcactcccccttttcccattgatgaaacggaaattatcttttggaattgtgctgttaacaatactctgtattgccacaagtaggtttttgcaatatgttgaacaaacgtgttatcccttttcaggtcctaaagtaaagagggtctcaggagggtgtaagggcagcacgtgagagtgtggcctgtgaggaggatgttgagtgacttcagggaaatcagtgtcacctatgcagagtcacaagctggctttcctagtcttccagcacctggataaatccctttttgtgcaacaagcactgatggagtctacagaagcatgcattcccgtgggaagggcatggctttggtgctgagcctctagatggtacagacaggcatcagggaccctttggccactcatttaaaccctcagccagaaggaatgaaatcactggggctgtcatgagcaatgaaaatgacaatctgcactttatagacacttagcatagtgtctggcatacagtaggcacccaacataccttgagtctgttatgttttgtctatcagctgttacatttgtttctattgtcttttctccagttttctctgggattggttagagtgaaacgtcatgaaattgtttttattttattttaaagacaggatctcgctctttcacccagtctggagtgcagtggtgtgatctcggcccactgcagccctgacttctttgggcgcaggtgatccttctgcctcaggctccccaggctggtctcgaactcctgggctcaagctgtctgcccaccttggccttctacagtgctgggattgcaggtgtgagccaccgtgaggtcctgttttgattttagactcatcccttaaagcccaggctgtcacataccagccaccactttctacgactccgtaaggcacggtggttcagaacacaggctgtggcatctgcagacctggctttgtgttcaggctcaaccacttagcaactgtgtgacccaggccacatcaggcttcttacctgtaaaacaggaaccacaggccttttgcatttaggggcaagggtaggcagatgccacatttccagcaggacttatgggacatgaacttaataaaagtctgctccagtagcctgagcacctttagggcttaacttgggggcccgtcaatgcctccaccgcgctctcagccacagaggaattcctgaactgtccaccagtggggttccgttatttcctgtgatgggcaggtagggctgacactctgttctccagtgtagatttcatagtttggatttgggcggcccagaaatagcctgcgagatcttactgaaccaggtctgacgtcatcacactaaatggaaaaaagttaggaacgtgctggtattccagaattcttttcttaaaaaagtaacgttccaaagcaaccatattgctaattgaaatagaattttttttttaaattcaggaaatgttgggccctttagtttccctcctatttttcattaggtattttggagcatttcatttattgagcacctaccgtgtgctggctgctgtgttatatgcatcgtacatattttgttctcacaacaactctggaaaataagcataaccccttttctcctgtagtaaaggggaacttggaaggaaacagaagcctgccagggtcagagagctcatgggcagccaaggcaggacttagacttcacagtcagaggcctcaaagcctgcgcttctcccgtgacactgtcatttcagagggtgatggtccaccatggctgaagaccaaattcagccaacagctgctgcagccaagagtccatctgtctcctctgacactgtcatgtccaacctgtttgcctgaacatactttggccactttggagtattctgctcagaagtaaaaataatgtcgtcaaatttcataaatagatttctgaggtatatacttctccgcaggaacctggctcacttactgtctttagataatggaaatcgtggttgcaactgaggttctttcctaagttaacaaatggttgttcctcaccgcagaactacaggaatgacccttacaaatgagcagattctttgttttctcttgattgctggcagcagctgctgtgggtgctcagtagaggaatgtttagtgagagaaactgagctagtgttgcagcagaggaaaaacactaggaaattgacgacttatctttccatttgcaccttcagaaataggttaattgtttcagtgactgcctctgtcttgattaggaagcattaatagcaattaatgatataacttcaaaaaaggtataggaaaattaatagaattctccgttaatataaattatactcattatctactgtatccagaaccatcaggcctgccaagctcgttgattaaagtacaagtggagttttttcggtctgaattctctagatagttaaacctttatttatttatttattttgcagtataaaattccccacagtgagccaatagtattatttagtttaaaatccctcaattctacaacttagaaacctttcataagttaattttattaatgtacacacattttatctacacgtacaaatattatttgatggtaatgatgaaactttgttaataaaggatggtgaagaaaagttcaggtcaaaaaaatatgaaattgtaggactgattttatctagctttaattctactctgcagtagaaacagaaggcttttttggtaggcagacgccacatttccagcaggacttgtgggacttgaactcaataaaagtttttttttggggggggtgggtggaatgccaataatggtaagaataacaatagcaacaatgatagcaaaggcaataaccaacatcccctaatctgcccctaggaccaggttcagtacctcacatgcattctcactaatcttcacacttacaggaatcttcaaggtagagggtgttaccccgctttacagatgaggaaactaagtcccagaggtggtcaggaactggctcaaattcagacagcaaagtggcagagctgagagtcatgcccaggtggggaaaccccacgcgtgcattctgtcactcggctgaactgcagcacagccctgggcttattttaagaacataaaacctgtctcactagacccaactctctgccctgttccttattctttctcagtgtcaccagaggacacatcagacacagttagccttccccatgtcaactctagatggagaggaatgcccctcgaaggagtctaggctgcctcaggattttactatgggtgggaaaccaatgcatttgtccttgcccttggttaaacggttatctgaagttggcttatattcatcctcttaccatccttaacagcaagcttgccgccaaattccgtcactgattattttgacttgatgaagcgttgctcttgatctacagattcctcggtgtgttgtggactttgatcgcttggccagctgtaatctgccagcttgaacacgattgatcttcatgcaccaggcactcacacctgcccatttggcggggttgcttatgtctttctcacaccttctagcttgttctttcttttctggagatccaacaatcagaaaagcattccgtatttattccttaacttataaggaacctataaatagggctcctgtgtttcttttcttttccccaagactgtgtttgaaggttaatttcaggattttcttggcatccttaaagcggtgggactgttctaaactcctttgaacaaaatgttgattgaagtgttatcttttgtaatatactcctggagggttgtagggatttggaggaaaggtcagagtgatagggagtgttttggaggaggtgagatttgatccagcccttgaaggatggtggggtttgtggtgctagatggctgatgaggtcatttgtagataggtggagaggtgtattagctggttttgcgttgatagaaaggaatacctgaggctggtaatttataaggaagctggctcacagtcatgcaggctgttcatggtgccagcattgctcagcttctcttgaggcctcaggaagcttttacccatgatgggaggtgaggggagccggcgtgtcacgttcctgaaagcatggtgtttttattttttatttatttattttctttacctaattggtaaacaggtgaatgcagttctacttggagactcagcccacccagcacagaacttctcacactgaatgagaaggcgctgaggtgatgtatgtgtaacccaggcagctcgttaacatttaggtcctgattcgatgggtctggagtgacacccactgagacttcgcctttataaccagctcctaggagaggtctgtggtgctggttgttgctccactttcaggaacaaggagctgagtaactcaccacgtgctggaaaacatgcccttttcttcgaataactcagaactagactcccagagcatggccagagccctggcttcacctgggtgtggagtggaaatgcagggtcttgattccaccccagccctgccgaggcagaatctgcacttgaacaggatccccagctgaatcacgtacacacacaagtttgagaagcactgacatggaagaggcaggtctcaagaataccagtaaagccagacgtggcttccagtaatgaaagatacaggtctcaagaacagcagtaaagccagatgtggtttccagtgctcagagactgaaaatcctggcatcaaattaagctaattcgtaagtgggttgaaattaattaatcagaaaggacaaaatacaaaaaaattagccacgcatggtggcacacacctgtaatcccagctacttgggaggctgaggcaagagaatcacttaaaactgggaggcggaggttgcagtgagctgagatcgcaccacttcactccagcctgggtgacagagtgacactctgtctcaccgaaaagaaaagaaaagaaaaaagaaaagtctctctgagtaaaataagagttgtactaggtttggaacaagaaaagatatttataaatgcatttaagatttgtattttcagcatcagttagaacatcttatctatagccatttcttagaaaagtctagttgtaaaagaacagtgatttttgcacatcttgctgaattatttttatttatgtaaataatagcagatggacatgtataatcatttcttttctaaataagtgtgcataaaaatgaagacattggagagcacttctaatccgagagacgttataaggattcagccaaagacaggatccttggggcttcggttcctaaccagaggggcaccccatggacgagcagatcaacccattttaattttttcatgtcttaagtaaaaccagagcttctcaaatgagaaattcacaaccaaacacttaaaagtggtagtacccagaatggaagaaatattctatcagtctggggcattttctttcctcacatattcctaccctaagtgcaaatgttcatacaactatattgatgaacacttcctctgccatggttttagatgatcaatttcttatttgtgtcatctttgagaatgacagactctgaggttcaaaaccttatggggcttctatcctaaccaacatcaaggaactataagtattcaacgtcccaaaacaataaagagtaagtaaacaactgcgtagctaaccaagtccctcctttgttctggaagaataattttgcgggaaatccttgctttctattcaggcatgtggggtacaccctaagctccttaaactccccgccatcttcctcagtgatatttgctcagcatccctaggttgattggtctatgctgtggatttgagctatgctggttaccaaagtgcctagtttttttctctttccctctccgtgccgacttatggggcgttttacttcttatgtatgagtttttccataggttgaacagagaccaagtgaaatttttaaagaaacaaatgacgctctcctattagaagctttgggagaggtttggtagaagtgcctattgtaattgacttgccataattacttttggattttctataaatttgctatacagctgttattcatgctgggcatcaccctgctttaaaacggcatgagttgctgggtgcctgaaccactcttactgttcattggtttggattgatagtttgcacagtccagatttgctgagtaatcattgacctgccacgtttttaataggcccacactgaccagcttggttcttaatatatttgaacaatcacataaatggaattaggacttcattttttattcacctgccttccagtctatgtgaacagactacttatgtttctagcagcagtagctcccccctcactaatgcttgtgataatatgcccgtaagtgagtatcttaggagggatcttagctgtgcttttgtgcacttcactccacacatacagcctccgcctggtgctccctccctctctctgtcgtcaactttagatttattgtcagtgttgattttcaaccaaaatatagatgagattgtgttgacatttaggaaaaaaaccttgcttcgtagcagattgagtagagaaccagttggtttaaatagataaccttgggtcatatcagaaaatgccttgttctagcagagtactctattcttgcaccgtgggactgactttattcatttaaaggaagctggggcagacgggaaaagaaatattttcttctctgaagacttcctgatttgtttgtacctctgttgtgacacccaagggtaagtctgatatagcggtttctaacaaaatgaaaagagatgggaaaacagaagaggaaattcctctccagttgtgaattatcgttcttcactatcaaagcatccctgtgcctggctcgttctgtggccttgttttctctgctcctggtccaaaacaatgacccacccattcccagagatagacaggagagaacaatgtgtacacaaaagagagggacagagagacccccaaaagaagccaacacccacctctgtctcacctgtgtgttcagatagggtgtggccgattgtgctgagcctgattatttacgcttctcagaatcagggctctccactcaggacagtgaatccccaaagaggctgagcccagaacctgccctgggggcagctggtgccaccgtgctggtagacgacacagcccagccaaagccacctggagatgagggtagcacaaatcctctctccatcctccgcatcctccggcgggaaatgctcctggatctttttttttttttttttttttttttgagacaggctggagtacagtggcttgatcatagctcactacagccttgacctcctgggctcaagtgatcctcctgtctcagactcctgagtagctgggactacaggcttgcaccaccactcccagctaatttaaaaaaaatgtttctagatacagagttttaccatgttgccatggctggtctcaaacttctgggctcaagtaatcttcctgcctcagcctcccataatgctgggattacaggtgtgagccgctgcacccagctgatcctggtgttcggacacgggatgctgttccattcctggagctgttttggaatgaacgctatcaaaggatgtggttagcttcagttgtttactgctcctcatcattttggaacattgagtagtctgtcacttgatgttggttaggatagaacccctgcaagattttcttcctcagagttcatgctcctcaaacttgaaataaacaagacactgattatctaaaagcatggcagaggaagtgttcattgatatatttgtataaacctttgcatttaaggtgggaatacgtgagaaaaaaagtgccctatgactgataaaaatatttcttctgttccaggtactactgcctttcagcatttggttgtgaatttctaacttgagaaggtctggttttacttaagatatgaaaaaataaaaaggggggtgacctgttggtccatggagtgccctttgtggttagaaactgaagccctaagaaacctgtctctcaaaaggttggcgcttggttctgtgtgtttttcccatggctaggggaaggtgtggaagagaaagctttctgtttggtgttgttcctgttaagaaagtcttcaaaatgtaacaaacagtcctgggggcattcaccagccgcacggcatccaggcaggcctctttgtaactagacggtgaatttaccttctgcctgaatagcggtaatttctactctgtgagttgaacagtggtatctgtagcaagagaaaataacttcaatttagtcaggttttctaaagatcttccttgtattttaaggaggggccataattgtgaatttcaagatacactttctgaacagactgtgacccccttccctcttatttatctccttttttctttctctcctgtgttcaaaccatttgttaagacaattttctgttttctccagggactggggattgaatgtctttgttcttggtttatctattaaagacacttttctagttacagatactgtttgtgaatcacaggctatgcaaagaacatctgattatcagcggactggagcccagcaaacagtcacaaacatcccagagctttcctgcctttctgaaaatgtgcatgcaaaattcttgacatgaggaagttgtaggaacaggtgttgatgtctatttggaaagtgtaaagttacacttatgcaattttagcaaacatctattaggcacttactgtttgccagatgctctgaagcatgcagggatccacaagtatcacgtgccttccaggaatttgcaaggagtggggccgataagcacgtgtccaaatgcgcaaggctgaaagagatgggctcttgtcctactttccccagaagtagagcctgtgagctcaacaaagatgtacgtgcaatagtgcactgagcggtgaccccagaaagtgtgagtagaggagtgtgcaaaggacacagcatggaaaggcactggtgagctctcatcagtgagcattcatcagtgtggtgagcagcgaggttcagccccgaggcaaccccagggagactgtgcaaagccccttcggtgttgcttacccaaggaggggaggaagcctggatatttatgcatcaactcccctcttgtattggcaagaacaactttgagagcattcttttctgtctgtctgcctcacctttgtaagccggtcatatctctggccacagaatggcctttggtaggaactgatgggtacttgcaaaaagccctgggcctgttggtgaatggtgagtgccagggacgatgggcagggcacaggcagcacctgccacaaagccatattaacagagtgtagcaggtgcaccccacacctgacaccgtgtacaaagcttaatgcaaaatgggtcaaaaacctaaatgtgagacctagaactataaaactcctagaagaaaactttatgacattagatttaggaatgatattgataacactaaaagcacaggcaacaaaagaaaaaatcaaaattgaaaactcttctgtatcaaaggacactgtcaacagagtgaaaaggcaacctgtggaatgggaggaagtatttgcaaatcacatatataataagggattaaaatcgagactatacacagaattcctacaactcaacaacagaaaaaataagctgatttaaaaatgggcaaagaactggaataggcatttctccaaagaagagatacaaatgactggtaagcacatgaaaaaatactcaacatcactaatcatgagggaaatgcaaattaaaaccacaatgaaagaccaccccactccctttaggatggctgtaattcaaaacagaaaacacaacaaaaacagaaagtaacaagtgttggcaaggatgtggagaaactggaacgcttaggtactgctaggagaaatgtatgacgaagtagcctttggaaaacagcatggtagttcctccaaaaattaaacgtcaggttaccgtatggtctagcaattccacttctggatatatacccaaaagagctgaaagcagagagttgaacagatgtttgtatgcctgtttatagcagcactattcatgctaattagaaggtgagaacaatccaagtgttcatggacacatcagtggataaactcaatagagtccacccacacagtggaatacgattcattcttgaaaaggaaggacattctgacacatgctgtatcaatgaaccttggggatgttatggtaagtgaattaaggcagtcagcagaagacaaatactttgtgattccacttccatgagttatctagaatcaagttcacagagacagaaagtaggatggtgggtgccaggggctggggaggaggaagtggggagtgagtgtttaatggggtgcagagtttcagtttgggaaaataaaagtgttttgggccgggcacggtggctcacgcctgtaatcccagcactttgggaggccgaggcaggcggatcacaaggtcaggagatcgagaacatcctggctaacacggtgaaaccccatctgtactaaaaatagaaaaaaaaaattagccaggcatggtggcaggtgcctatagtcccagctactcgggaggctgaggcaggagaaacacgtgaacccgtgaggtggaggttgcaatgaccctagatcacgccacagcactccagcctgtgtgacagagcaagactccatctcaaaaaaaaaaaaaaattttggagatgtatagtggtgatggctacatcacagcttgagcgtccttaacgccaatgaactgttcacttagaaatggttaaggtggtattttatgttttgtgtatttaaccccaatggggggaaaaaaagaagtataccaaagtacaaagaggaaaggccactttaatcaagggtactgggaagcctgcctggaggaggcgctgtgtcctctgggccctgctggatgggtgggatttcaggaggcagcagtaggggtggggacgagttaggaatggagagagctgttacaggtggggacactcaggtccgaggagggcagaggggaatgtttcagagaatgccacacggtcaggtgtagccgaagctcaggaatgttggaactcggagaggctgtgaaagagaagccctggctgcctggccatgatcatcatgtgcctggtcttgactggcatgtcaagaatactgtccgtgcagtggcgtgtgccccaggagcacggcagttctcaacaagactgcaccgagatctggagatgaaacttctcagctctcttacatttggccatgcggaggtctacccaggaaggacagccttgtcccaaggacctcactctgttcactcaacaggtatttatgaggcccctatgacatgtcaggcattgttctaggccctgggaatgtgggcagaacagggcagatgaaaatgcctgtgctcatggtcatgcgttccagtgggggagagacagacatgaacaaaaccagcacaagtcattcttcagatggagctgagaaccacggggaagaccaaaggccatgcggcagaaccacccagcctgcagaggcgggatcatcagggcagtgtcctcaccgctcttcttaaacactgggcttaacaggaggcttttgtggacattaaaaacaaaatcgcaggtccgtttggatccctccattccaaggtttaaacacaatggtgttcgctggacggatctaagaatcttagccactctgcctagcagcctctcaatgttttgtgtctctcgtttcaactttgaaaagagctttgtgccagggagctcctgcagtttgggtcgaggaggaccaaggcttcaaaggcccctgcccgcgcgtcctgcaggttcccattgtccgtgttaatagcctcagatgggcatcagttgccctgatgggcttgggctccacgcccgggcttgcatgtttggcaaaattactcaagagcatttcttttttttttctttgagacagagtctcactctgtcgcccagactggagtgcagtgacgtaatctcggctcactgcaacctccgcctcccatgttcaagcagttctcctgtctcagccttctgagtaactgggattacaggcacctaccaccacgcccggctaattttgtatatttagtagaaacgggatttcaccatgttgcccacactggtcttgaactcctgacctcaggcgatccacctgccttgacctcccaaagtgctgggattacaggcataagctaccgcacctggcttccaggccatttcttatcacagctaaaagtgatctgttacgtggctggttacattctcagcaactttagaattctattcagaagtggacctaatcttgagacaaataccctcttaccccttggtccactgaaaagacttatgatcccagtctttctattggtgatggttcttctattcagtgggagattatgcatttatgtgtttggatagaaattagatcctcagcctggcacggtggctcatgcctgtaatcccagcactttgggaggccgaggcgggaggatcacaaggtcaggagatcgtgactaacctggcgaacacggtgaaaccctgtctctactaaaaatacaaaaacaaaattagccgggcgtggtggcaggcaccagtagtcccagctacttgggaggctgaggcaggagaatggcgtgaacctgggaggcggagcttgcagtgagccaagatcgcgacactgcactccagcctgggcgacagagtgagactccgtctcaaaaaaaaaaaaaaagagatcctcagctgttgtttcttgaatcagatatttggatcactctagcatccaatcatgcagctcctaaatatgctcctaaatcatgcaggtccaatcacgcacctgttttacggtttatcaatttgtgctcatcctgaactaaataaacaaatccatgagccaactgcagcactgtcttttatcaccttcgtttttctctgcccagtaaaaagctgaagaagatacattctttgttaccttccattcatttccaaatgtgtaacttttcaaatatgttataaatgagaagaaaagaaactgctggattgtcaaactgtcattttatttatcgtctctcgtcagtagaaaagtccagaagcagtgcgttgagatgaaaatgaaggtgcgtgaaagagagaattggaaatgggatatacgaccgtatttcctctctttccctttccctccctcctgctgggcaggaaacgagaagaacctagtcagcggggaatacctgtctccagggaattttttgggattagatcttttggggttgggtttgtgagggggcctgccctgtccccacacatgtgattcctctcactgcacaatcctgatgcctttggcattcgtgattgccttctggatgatgaactataaaggaggcagctcttaaaagaatagaaaatgtcttccagacacaacaaaatatacactcagaaatgtataaaccagcttcccacgtccaggggctgggccagtacagattaagaaggtgaacgtgtggaaggtaaagggtgggaggaattttctatttcgtgaacttgtttttttcttgttagaaaggaaatcacagtgtatttcagtttccacaataaagtgcatctcagaattgcccaggttctgccacaagagacttacctcttggtgggctggggatgacctggatctccctgctgcctgcacgtctttcactttggacattttaagaaaaaaataataatgtatctgggttcttggagatatatacatatatatgtgtatgtatatctgagtctctttaaaaataggtatcccgggagcagagccacagcctgagctatccagatgcctgctccccttggtggaaagagatccgacacacctgttgctctgagatgcttttgcagacaggaaagctcttaattcctttgctaggccattttaacaatgcagagaaaggtgacagtcttcacgtagtcccaaaggcaattaataagcaaaaaacttacctgattttaagtgaagtgtcacggagctgtcttcacccagcccatgaaaaaccaccagtgcaccttgagacgcgtaggcaatgttcaaggccaggaaagactcaccagttcctgtgcttcccattgtcagaaagcaggtggaggatggccggagccaccctggctgcagaaactgacctacagaacttctcattgtcagaaagcaggtggaggatggccggagccaccctggctgcagaaactgacctacagaacttctcattgtcagaaagcaggtggaggatggccggagccaccctggctgcagaaactgacctacagaactgaacagaatagtgattcaagttggatatttagaatatctaaacgtgctttgcgggacagtgaaaccctgcttggtggaggtcaggacttctgcttctgtatagctctgcattccttagccaccgtcctgcaaggcaaacgcgaaaacgcatcttaaaactcgagcagaagtagccttggttgtatgcctgaaaatgcctgttcgtttggaaaaagacaatagcttcccgttttatggcatcttcttcttccttcccagccctggccatcgttctcactgtcctcagcggactccctgggcctcctctttaaaggtcagtgctgaccgggtgtggtggctcacgcctgtaatcccagcactttgggaggctgaggcactttgggagaccagcctgggcaacacgatgaaaccccgtctactaaaaatacaaaaaatagccgggtgtcgtggcaggcgcctgtaatcccagctactccggaggctgaggcagaagaatcacttgaacctgggaggtggaggttgcagtgagccgagatcatgccgctgcactccagcctgggtgacaaaaataataataataatagtaaattaattaaaaaaataaaggtcagtgctccctggcttctctgcaggccatctcctgtgctcactcctcacactctcatggagtggcctcttgatctcctactttcaatcaccgcccatgtaccccctgaacctgcgcacctgggtaccccgcaggcacgtcttaggaagcttgggcagcttctgcagaacgccttcccttctccctcctgacccaccagcactgccactcccagacccccgtctgtctcctgagctttctcccttataagctgcccagccacccaccaagcagctcaagcgagaaacctggagagaagcaaggggtcttaggtgcctctgtccctctctcctctccctttgtccccttctgtcatactcacccccgtctttcttcctcctcttagcaacacccttgacccattggactttgcagccttttcccaaaccgtgtggtaggctttggttgtggctccctgaccgtgctcccacccgctctagacagtgtgcaagcctggccatggctttcctccttgacgcccttggctgcctctccattccctgatggatcaagtccacactcctgagtgtggcgctcctgcctcctccgtggccagctgtggccacgcccatgcccccccactgcccctcaaccaccaagaactgcttcctttttcccaaatgggccaaacgggttccctccttttctcctattcctgaaatgcctttccttccattgtctgactgggggatgcctatccatcttccctgctcaaacctttcccaatttctcctggaagaactgacctcaacgccacacccacactccacggcctgccatctcccttctctttggctttcgtagctccgccacaatgtgcttgctctgttcatgtggctgccatcctccaccaaactcgaacctctttgacgaagtggacgttaggcagttcaactttgtatccccagcacctgccaccatgctcctgaaataagaggcagttgttacagttgcagtcatcctgtagcaatcgtgatctgctggtgataaccagccgtggtatatttggacaagacttcattctttttttttttttttttttgagacacagtcttgctctgtcgcccaagctggagtgcagtggcgtgatcttggctcacctcaagctccgcctcccaggttcatgccattctcctgcctcagcctcccgtagctgggactacaggcgcccgccaccatgcccagctaattttttgtatttttagtggagacggggtttcaccgtgttagctaggatggtctcgatctcctgacctcatgatccgcccacccaagcctcccaaagtgctgggattacaggcgtgagccactgcacccggccaagacttcagtcttctctcagcaagtgcttatagtcagactgttgtcatttaggcactttgctgggtacagagataaataagacatgcgtccctccttatttcacatggaccagcccaccagcaggtaatgactctgcagagacggggcagtgtcagaggagcaggggtccccaaggcagcagcttgagagggatcccttcatcttctctccagataaccagttggcaaaattctaaagcatttttctaactgttatcttatctggacaacacgatcaaaaaatactatgataggatgttggaaaaagatttaaaagaagccaaagaacatattgctcaacattgagcttttaaaatagggtctttttccgtgtgtgtgtgtgttttaaaaaaatgttttctcttgtttctacaagttttagaccaattatttttggagcaggaagatactgagttttcagatggtcctgtagacccccttacctgctggttttttggtggaatcctgtttctacaaaaagaaaaccccatagatgtagacacactaaaaaggaaaaccctggagattgtttttaatcttagaatttgtggcacttgtactacggtttttctcgtaacaaagccgcttctcgttggaaatgtctatttatgtggttcatgttgcccatgtccacttggaggttatgcctgagtctcatggctcagggagaatatgactcagcatcttttggttgagggcagctttgacctcattgttttctggtgtggcacagggagcagcctggccacgtgcggggaacggcccatggcctgtccctgttcgagctggctgctgcgaaagtttcaagaggcgtattcgccaggagcactcggctgtgaatccagacacggaagacagtggttttaatagagtaaaccaaaatgtaggatttgctctctccgatattctggaaaatcccactgctttagggcatagacttttcctgaaaatagaaggctgtgttttttaatgaggtgctgagatctttgtaacaaaagtgggggagcaactgtgctcagagccctgagggcaggatgttccctctgagctgtggccggacttcccgccttcccaccaggctcaaggttcagcagccaccttggcctctgcctccccgtcccctcccttctttccccttctccccccacttcctcctcctccgtcctccccatttgtgcttcagggtcttgcatattctggtctccctgcctggaaagctgtgtgcccagctgcctacagggctgcttcctttcctctcctccttcagagcggagtccatttcccccaccccacccctgcctcctggttgtgttcctagcgcggaggctccctgaccagctcttgctcattcgaccgctccccaacccggcgcacggtgcggggctgccgtggaaggggcgttttccattcatccgactttatttgcagtgactccacagcttagcagttcgggttaactttgaactttattttttttctgtttcagagacttgatattctttaaatgtactttttaattaaatgcgacctagacagcttctccctcctcagcctcttctatgagtaaagaggttcatgtgggggaaattgactaggattaggcttcatttccctctgctgcgtgttctttattcctgtaactacaaagaggcgtcatctgaagtgtttgcctttctgcctctgaagctacctggcgcccgttggttgctgacttctgcagaaatcctcctttgactcagtgtcttcacctccagccacctaaaaccagcctgggaaacgttcagttgagaacactactgtaaagtctcaattaaggaagtgcttgagggaaggagtgttctagttaatttttgcttaacagagcacaaccagtgtttttgttaggaggaggcagcattatgtaaaagaaagattatcaactttggatgaagacattccatgatttaaagcttttctctatcacttgaaaccatgtgacttagggcctcaattttctcatctgtaaaagagggataacaatcgttatcttactgggttgtcactatattaaatgggcaacatgtgtaaatcatttaccaagatgttttgtggctgcatggcagcttggcaaaatagaattcctttctctacttttgttttcgttcttggaactgaggccttattcgttggtatatggcattttaaaaatgttttgttaatgtaggacgttgaagtagaaggtaatagtagcggtggctcttaattttagaatctttatgataaattaatcattgagtatttgatgagtgtttattatatctcagatatgcaaataatagaaataaagaggttgtttcattcttttaaaaatgcttagatattctttgcatcttctaaaaattgaacttggaaaaccttttggtagaaaagccatcatggcaggtaaaaaatgtcgaagtccatctgttgacctcttcttgcttacaaaaggagcaaaaaacccactcaaaagcagtaaaagaggaagagacgtaggtccacaatgacaaaaagaaagggagaggagccagtaccgatgaaggatgagaacaaacacccagaaagcaaatctcagagggaggcatcacaaccacctggggagagggcctgagcctgaggacacttggggcagacttggtcatggaggggctggttatgacagagagctattagctactagcatggagggggagccattgctagtttgtataaagaacagtctatgttgtaatcccagctactcaggaggctgaggcaggagaatcacttgagcttcggaggcagagtttgcagtgagctgagattgtgccactgcactccagcctgggtgacaaagtgagactctgtctcaaaaacaaacaacaaaaacagtctacttgtaacccctcaaactgtaagcagaatacttaagctagattaaaaaggtagatgaacagacaaacagaaagttatagataatgaacagccccagagaaaagacatccacactctgggatttagcgtcccttcggaataatagtgagtgtttcactttattaaagtgaagtcgtcagttgacatctcctggttcattcatatgtataaaaggacacagggatcatttgaagaaagcccttcctgtaaaaggtatatcaaattaacaaagagggagaaaaaagatcccagaggaacacaaaacagaacttcagaaagtatttatactctccgagacatttagaaatgtatttcacccatgaaacaagaacaggatgcaatgaaaaatgaacagaggacaaaaagttagtcttgggagtcacaatatggttactgaaaataaacatccaaaagaccagttagaagataaagttgagggccgggcttggtggctcacgcctgtaatcccagcacttcgggaggccaaggcaggcggatcacaaacgaggtcaggagatcgagaccatcctggctaacatggtgaaaccctgtctctactaaaaatacaaaaaataagccaggcgtgatggcaggagcccgtaatcccagctacccaggaggctgaggcaggagaatggtgtgaacctggggagcggagcttgcagtgacctgagatcgtgccactgcactccagcctgggcaacagagcaagactctgtctgtaaaaaaaaaaaaaaaaaaaaaaaaaaaaaaaaaagataaagtttgaggtgctctttccaaaattaaaaaaaggaaaatattggaaaaaagtaagaagcatgttgaatcaatccagagtcctaaaatccaaccaataagagccctagaaagaaaaacacagaaaacagaggggagaaaattatgaaggaactaacgctatcaggtatgcatgtctagagtgaaaggacctttcagttacctagcacaatgtataaacccccctacacttagacacgttttattttatttatttttttgagacagggtcttgctctgttgcccaggctggagtgcagtggtgtgatcatagctcactgcagcctcaacctcctgggctcaagtgatcctcctgcctcagcctcccaagtagatgggaccacaggcacagaccactaaacctggctaataaaaaaattatttttgtagacatggggtttcactatgttgcccaggctggtctcaaactcctgaattgaagtgatcctcccacctcagcgtcctgagtagctgggactacatgtgtgtgccaccacacctgctaattttttttttttcttggatagagacagggttttgccatattgcctaggctcatctcaaactcttgggctcaagagagccactcaccttggcctcccaaagttctgggattacagatgtaagccactaagcctggccaaaaatcattttttacctcattcaagaactttgaagacttactttttttaagttatttaaggatactctagctaagtgaggacatatgccaagaataaggagacagtgaggtccagggaacggcaggtgttacccaagaatgcagcggaggagagtctcagagtgacgagtccacaccaaacaggaaagggaatgtctctgtgtttaaagggagctgggtagattgccttcatgtgggtaaaagagaacagtacaaaaggctataaacagaatgcagccatttttgccactcacaccagaggcgtgcttttctctatttagccctttgtgctaatatttaactccgtgtcttaacaatatgtgtctattgctagttcttgatttgccaattttagacgttacctattgaccttctgctgtgatggatgagctttttacctcatgcctcttcacacatccttctcaaaatatagtccaaacagtatgtgtaggccttttgttatttaccattgtaactctaagatatatacatgagcatgcatgcatgcacacacacacacacgcttctttatttcttgtaaactggaaacagtagcttttcactccctgttgtgtaatgagaagccaccctcacccccaattctcttctgctcttccacctcactccgtcttctgcagtttcatatcgtccaggttaaaaacatttaaattctgtttcctaggcacaattacatctggcattttagactatggattaattctaaagttgaaataaatatacactgtttatatttactatgtaaagattatctactgcacagctagacagtatagagagattatatttctttcttctacagatttttttcaccgggatttctaattgcctttccttttaaaaagaagtatttgcttgtgtgtgtgtgtgtgtgtgtgtgtgtgtgtgtgtgtgtatttttttgtaaacatggggtttcactatgtatatcttttaaaaatacatatatatctatatgtgtatctatatctgttgcttaaaaatatctgtatctatatatctttttaaaatatacacatatatatttatatatatttaaattacacaggtaaataacagaagaagtaaaaatcctgtttgaaagtatcatgaagtggtgtgagctaaaagctcatctgttgtagcagaaagtcaatagataatgtctaaaattggctaaaaacaagacatagcaatagatgcctataatttaaagacatggagctcaaaactaagataaaacactaacagatttaggggagattgccttagggagagggggtatggttttgtttcattttaagcctctctgtaatgttctttttaatttatgtgcacatatgaatttgattgaaatttaaaacaattttttaaaggaagaaaatataccaggatcatgtactacaatgagcactatccttgctattgaaatatctggattcaggtcacgtaatattctactgaaatgtttttgtgcagtctcaacagaaaatgcatagctttgccatcagaagacctatataaccttgaccttgttgtggtggtttccataagtcagattcaccttgcaggtgaccttgtgtgtgtatcaccattgcttttttttttttttttttttttttgagacggagtctcgctctgtcacccaggctggactgcagtgatgccatctcggctcactgcaacctccacctctcgggttccagcgattctcctgcctcagtctcccgagtagctgggactacaagcatgtgccaccacacccagctaatttgtttttttgtatttttagtagagatggggtttcaccgtgttagccaggatggtctcgatctcctgacctcgtgatccacccgtctcggcctcccaaagtgctgggatgacaggcgtgagccaccgcgcccggccaccactgttcttttaaggctgtaggtgaatcaacacgaaggagggcttcctcctcctgtggtggagctgaaccccgtgatggatggatgtgtgcggtgcctgcggcacttggccctgcggggctgcgaactcagccttggggctcatctgtccacagcacagccccttggagtctgccaggagctgagcccccaccagtctggggaggagggactcagtggcccaaggaccattctcctcaggcgtcctccccagtcctgaactcaggcttcctcatctgccaccgtggctgagcagtgattaatgccaaattagcaccctgttcaatgacctttcagcattagccactgcctcccttcacttcacataactatttgcaaatattagcttctccggccgtttctcctcatcagccactttcacagatgacaggcaggccgttagtctgattggcattccattcctgtcctttgccccatcgtgagtgcatccggactctgccatcttctcagaaatctgataaccagcccaggaatgttggcaattttacaaagcgaaggcgtcagcaggaaggtttccggagaagcttcgagggtccgctgcagagttggagagtctagagatggggaaggctgcctcagccccccagggacccagggctgggtgagagtcaccctcacattattcaatcaacatatagattttaaaacattcattacttggctctgtctgcatcaggcttctgtttttcttttagaattcacatgcacgtttaatacaaaaatctcatactgcttaggcagtgcaaggcagagcacagagctgtgggaaatcagagctgatgagaagcccgtcgtctctttcccgttgttctctctccgcggccctcaccccaccgccagccgggcaggctagaacctttcagttgccagaatcctccgctgccgctcacgatggtggcgagtcccttcagcgtgaagcccagatgaagcgttttgcgtttgcagtcatttccatttatttttatttccagcctcttacatctccgccctttattgaaatccctgttctagaaatgttggattggtcttcattttctctaaataaacagtagtaaagtgtactgtgggtagtttaattttgatgttaaatgtattttagagaaaagcggcaaaaaatatgtcctatttttttctcccttgtcaccagaagtacgagataaattatttatagtttgatactcaaaaaacatagattcaggatatttacttttcagaaaggaaaaaaggattgaaactgcagtaacagaactgaaccctttgttaattgaatatattggctccagggaagcatatttggacaggagtaagaatgcccactgctttccagtgacacccatgcctaacgtagtggctgatacatgaaatatttgtggaattgaacagatttggaaatagcaggtagactaggtaactcagtaagcaaactcttaaatcaataaaagaaaaataaagccagcaagcattttggaaaatgccaaacagtttaaataaagcccctcagccacacaacacacagagcagtagcgtaaggcccggtaaccatgcccggtaggacaggctgtggattgtgcctgaggacactggctgtgcttggaccccatctcatgtggtctgagaaaggccagggacagtgaccctgccccagggcttctcatgggagttcaggtaggggccatgaaatttgggtttcctattagcgtgactctgacaatagtcttcatttgtcatgctccgatcatcccatcttctatctgccctttcactttctgtggtttccattaccctccgtcaaccatggtccgaaaataggagagtacagcacagtaagatattttgagagatagagagggaccacattcgcataactttcattacattatgttatcattgttctgtttcattattagttgtagtcagtctcttagtgtgcctgatttacacatttatgacaggtgtgtatgcagagggagaaagtttgaacagatgcccttccactcacaatggggttatgttccaataaacccaccggaagttgaaaatatcggaagtcaaaacgcgcttttgtagccccgttgtaagttgaggactggactgaatgtgtatggcttttgcaccatcataaagttgaaaagccctgcgtggagccatcatacatcagggacaatttgtgtctgtagggattggtactctctttggttttaggtatccccgggggtcttggaacgtgtcccctcagataacggcggggggtgctcctgtacttagagtttcatggacatttctcttttctctgccacaggagatgttggcacacctgaaaccatggccccaaccattgtggttcccccgggcaacagaagtgtggtggctggatccagtgagaccaccttggaatgtatagccagtgccaggtacgaggcgcgtctcctgtgagactcctagtaaatattccatgacctgtgacgagccgacgatagaaggatacactggagcatgaggttcagccttctagcgacagtggtcttgtttggccgggtgggccatgaatacgagatatgggtagataaggaaatggacacactgatgtcttccagagtcccccactgcaacagggcggtgctttcaatgcagctctgggtggtagtggggggctcctctgagatcctctctagggaagagagaggagttgaggcagaggaaaaagttcattgctcttctcctcttagtcagccaaggtgttctctgcctacttagcggtcgctccagaatcaagctcggatgatcccgccttccatgtcgttgtgtcccctcacagtatttattttaaacattcatttcctgagcaaatgggatcattagcacttatggtccattgctgcggcaattagatatccttgcttaatagcccttgagcagaatgcatcgtcaatgcgtgctgggagggagtagagttacatctagattgagttttcagtgtccgttgttcaacccaccatgcaccctggtagcattagcttcgtcaagcctgtgccgagtgcctgagatgatgaccgttgccacctccctgagtcacaatcgtcgtcatgaatgcctttcattcccacaggcctgtggaggacctgagtgtgacctggaagaggaatggagtgagaatcaccagtggcctccacagctttggaagacgcctcaccatcagcaacccgacgtccgcggacaccgggccatacgtctgcgaggcggcgctgccggggagcgcttttgaaccggccagggcgacggcctttcttttcatcataggtaatgcgggagcctctaagtggtgttgccagcatctcagatagcatccgacactgactcttctgcagaaacaaaatagcgtatttcagtggctttatttgtaactcggcaaatgaaggtgaggttgagtttaccttcgaaatccttcctagccttctttcccaagaatataagtccattaaatccaaagtgttgatgttctcaatccttccaagaaacgtccttctgaatactccagtcacaaagctcgggaaatagagcggtgaaacccctgtcatatagatccctctcctattctagctttaggctgctaagcttttctgtaactcttatttggctatcgtgatcggtgttcagaaactattctattattgctgtccaggcatggtggcttatgcctgtaatcccagcactttgggaggccaaggtgggcggatcacttgaggccaggagttcgagaccagcctggccaacatggtgaaatcccgcccgtctctactaaaaatacaaacatcagctgggcgcagtggcgggcgcctatgatcccagccactcgggaggcggaggcacgagaatcacttgaacccaggaggcagaggttgcagtgagccaagatcgcatcattgcaacccaatctgggccacaggagcaaaactccaactcaaaaaaaaaattattaatttagaaattattctattaattattaatttagctgttattttttgacctagcagaaaatgtaaaactatcggatgttaccttttgttaaacttaaaaaaaaaaagagaacagagatgcttcctcaaactgggcgacatattattcctgaaccaaggagaaagaacataaaattaagtacactggagttgcccagctctaaatgctggaaactattagtgtttagggagtgtgcattgtacagtggctaagaaaatacaaaacctattatcagtttatgaggaggttaagttgtgaggcaagtgactttatttctctcatttttccagctactgtcatgcatttattcttcataagtggccgtgatgactatgagagcagcctgtgttccgcagtggtagccgctgttgataagaggtagccttagaggccgcctctaggaaggagaatctcgacttcctctctcctctttgggaaaaaggggaattgagaacaggaaaattcaaataagaaaaccctcagagagccccttaaataaaaaaatttgcagtctgccactttgcaaaataaggaaaaaaaaaaaaaagcttgtgttttcctatgaaactagcaagaaaaggaatactgcacaaaaggtggtttaccttgatcacgtcccattcctttaatcattaggaaatgactccatgtcctgaccttgactcttctaaatacaatgcagtgcaaacctgtcggtccctctgaaagaagcgaaagtctgttaaaagcatccaaggaagccggctttgagtcaccaatcactgttgattctacatgagaggcctgagctggtattgctaccttccccatccatgcttccgctacagatgtaaatatcacatcccattctctgcaaagattttttcatcgaggttgatctgtagttctaggagcacagcacattatagattcagccaaaattaaaatttgcgacgtgtaaatctctagtagacaggactataccgtgttcaaacattttaaggtaatttaaacaagagaagaaatttatctccctttaaacgagaatgtttgtttcgatcatcattcctttttaaaatatttaaatctatcttaagagctttagttttacatttatatctgattagttttgtgttctctcgagttagcacctctccgtgttctgacttttaaaggtacacaaacacacttcacttctttatgatgttgagttaaatccccttttattcataagaatttgctgtagcaggtaggatttttgtggttggcgcacactgcaaaaaccctgaagagagtgtctgtgtcaattccgagggatttggatgagattataatcccacgccctgtggccgagcattattggtttcacagggctgtcaccatgtacctgtcaaaagggccacccgtaggagcacacaggccaaagacagagaaacaaatgggctcctattacttgtattttatactgatgacacaggacaggctagttgggctgtttgcccacctgcctgtctatgttgcttaatttctgtggcttgaatgagagcacagaggtcggcttccaggcaccaccccgccactggctgcccagtcctgtggagcagcccctctacgccctccaccctcccctcctgcctcccctctacaccctcctctcccgcatcacctctacactctacagcctcccctcctgcctcccctctacaccctcccctcccctcctgcctcccctctacaccctcccctcccctcctgcctcccctctacaccctcccctcctgcctcccctctacaccctccaccctcccctcctgcctcccctctacaccctcccctcccctcctgcctcccctctacgccctccaccctcccccctcccctcctgcttctcctctacaccctcctctcccctcccacctcccctttacaacctcccctcaacaccctcccttcccgcctcccctctatactctccgccctccgttcccacctcccctctacaccttcccctctggcctcccctctacaccctccgcttccgtcccacctcccttctacaccctctacactgcaccattcatgggcttgaatgagtgttggcctcagtttccacatccataaaatggagatggatgtagatggtaccagctcatattgtgaaggttaaatgcaaaaatgtctgtcacagaggctctgaaatagtggctttagttgctgttggcataactctattatcctatatgtcccattgcactcgctatttaccaataatcagttatgtgacacacatttttcatgtttagtgtctctggaatcaggatgtgcctcaccacctatgaaaccattttttttttccttggggtaagacaaggatgccccttacctctgactgcagcaccttagtgcctgtgagatgcatcttccctccgagccacgccttctccacggtctcctcatcacacacgaagccagctgctcccacatgtgccctgctcctgctgagcacgatggctcggaaactcggacggcgagttttcactgggatggactctttacctggtggggcatctgctgccagccccttcaagttgttcatggaattcagtgcttgtggcttgggggctggctcctggccaggggtcccctcaggttccagagtcccctgcatccctggctcatctccagagccagcagctgcggctgagttcttgtcacacatggaagctctctgctgtcccctgtgcctccagctgcagaaagtcctctccttttaggggctcacatgattaaattgggcccacccagcgaatccaagagagtctccctattttaaggtgggatacctaatcccacctgcagagtccctcttgccaagtgagacagcatattcatagattccagaggtgtgggtgtggacacctccgggagccgttctgtccacctcggtggactagcgtgcagtgcaggccagccgagggcatgcgtgggacatgctgctccctgagaggggcgacctggaaggaacagggaggcagcgcaggaaacatctttggatcttgcagtgatccctacacagaagaagctttgcaactcagaagccaaatcccagcagcattggggatgggagagcaggaaaaatgcatggtgttgttggggggtccttctccactgcggttgcctccattgggcctgagcctgcactttgtcacactggcattttggagagtgaggtcatttgacagaggcccttggtttgggggcagtctgggaggtctccccacctcctctcctgagactggggagctagaagcttgcgctgcccctggaggcagctgccatgggctctgggccatgtggaaggcggaaaatctgagctggccttttcctaacaccctgacttcacacagggcatgagaacctttccctgatgtcttcatattgtttcaaaagagggagaagtgtttgtttccatcccctgttttgttggctgcagtcaggatcaattttcagaagtccagggtggacccatgttggcagagtaccctttctagacacagttgccactgacaggctaagacatgccctcgccctcttgccctctgaagagtaagtggttgagagtctatgcacaggatgactcatttacaatgggttttccccagtgtttaactcacgggcttttcacggtccataggcttggcatttcctccggttctttgccttagagcagactgtgtgtaaaaccgtagctggaaatggggagaaactccatctgagcagccgctgggttagaatactaggaagggttggcagggagagaactcgtaccctcacacggtggggaagtactaagggaagctcagaggccacgcagggcatgggcagctctgcacctgctccccaggcacagcgacctggaaggctttccagaacaagctaagagcatccacaatgaacagccagatgttttccacccatgcctagcactgagctactaaaactgcccaggacattggcccctgcaggcggtggcaggctgccccccagaccttgcccatgccacagtactatggagagtgtggagtgggatgagttttctcaccaggtggcatgctgtgtgccaaacacagatggtccctggctagggtggagagaggtcaccacttggagaggagcagcatcgtctgggcctggaggtccccagagccatgcacttgctcagccaagccagcttcgggtcactgtgtggagtgcccgtctccctgaccccagcgaggtcccttcctggcactcgagggaagcctcgggggactgtaccaggcgacaacggtaatcagtacctcagggaaggcaccctgggcccgtaggtgccgaccattgttatctatggattttgtatcatcaaagcacaggtcatcttgggtgaatctcaagggaaccatgaagagtgaaaaaaatagttgcaaaagttacactcgatgacctcctttctgtaacgttcttgaaatgacaaacctacagaaacagagaacggattagtggttgtgaggggtgggggtttggggtgctcctggtcatggaaggcaacacccttgtgctgatggacacgtggacctacacacgtaataatgttgcatgggacgtgcatgtgccgtcttttcacgcacacttgagcgcaggaaacactggcaagagctggataaattaggttgattgtatcagtagcagtatcctgatcatgatgttatgctatcgttttttgcaagatgttaccattgcgggaagccgagtgaagggtccatgagctctttcagtgttacagtgttacttctcacaactgcacggactcgacagttttctaaaaagaaaacgctcaactaagaagaggaaaactataattaatcataagcaaatgttgttgtcgaatgtatgtttttttcctttttccttccatgcttttaatcagatcatgacggtagatattgacttagcttccctgatgaatacaggtcaggacctgcacacaagggccctgacagcaggcagctactgtatgtatagttggaatataaataatactgccttcatgattattgattgaggaaacgtgatcaaatgggggatgtatgagttgtgcaatgaagatgagcttgaaaaaggtagacattaaatgctggcaatatttcttcaggcttggtctgtacacatgaaaacttaagtagaggaatctgcttccttctaatgaatttgcagccatctcctcagccggagtggttgattcaggcagattctttctgcttgagtggtccaggtaatcgcagaagtgaaacatcactttgcctccttccagaaaccttcagccgcttcccccttaatcgtttctttgaaatgcttagttttcatttctctttttcatcttttaggtcccaccttgttttaaagatacagtcaatataggaggcatgccaagctatcttatccacattcaacacaattataatgaaagtaaaccagctctggaagacagttcccagaaattaattatcgcacagaaagtgaacacaacagccttttgttatcatgataatgaaatcaccaccaccttaatacttgacaaacttggccatgcctctgttgaatttctgctgaataaactggaaaaatgttgcaattggctctccaaggaaattcattgtttaatacaaccactgtttttttttctgcggaacgggcgagtggagtatcgagagattgcaagtgcctaggagtttcctttgctactaaagatagatgagtgctcccttatatgttttctcttagttattatttggtattccattgaagtattaaatctctattttggagaagaactgctaagaattttaaaaatatgttaataggctgttgcccaatacaggctgcacaccttcctcgggcacttgacaagcttcacgagctcgtgtttagtttagatactgaagcaaactagcccataaaatacggtgctgtaaatataaacctttacgaacctcttggggtagtccttctaaaatgtaaattaagatattccatgattcaagcccataaactgaaaagtagccatcaccctgagtagtaagttgctttctgaaaccccagactgtaaattgcctttggcctgtgctcactgagttctgagtttgtatgcacgatgctaactaatgatgaaattttcaagaatggtttttaagaggagcccacactatcttaggttatatggtctctgacatatccttctttggcttaggggcttttttttattttcttgtttgaagagccaccatattttactgctgagcccgagagtcggatttcagctgaagtagaagaaactgtggacatcggatgtcaagccatgggtgagtgcagagtggctgctggacaaggagccatgactgggaggaagggaaacaacctttttccatagcagaattgccatcattctagggagacattgagtgtgatggcgaagagcagacttcagagagtagatcggtcttggggcagtgactgtgggtaaggcatttgactttgccaagcttttgcttcctcccctgcgaaacagagatgatactatttacccagcagagcaaaaaggaagcccacatctaccccagacagagaggggactccatcatatcctgtggactccccttccaaggccctgacttcacaagtgtgtgaccccccgagattcggggcagaaaattctttctcatccatggggtgactaggactggtgagcacagccactctagaaagggagatgggtgtacatgtatttgtagtaggtacgtgaggtacaaggcaattttgttccactgatgtattgcacagtggtgaagccaaagctgggagtgcgtccgtcactggagtgatgtaccctgtacccgttaagtaatttctcatcgcccaccccacacccttgtgagtccccattgtctgtccttccacactctgcatccatgtgcacatgtgacttagcacccacttattagtgagaacaggcagtctttgtctttctgtgtctgagttctctcacataactcagtggcctccggtgccatccaggttgctgcaaaagacacccttttattcttttttgtggccgaatagtatttgaataggaaatgttacctttttttttttgccttttcagctctgggtccccttttcctttgccattcaggtcatcccagccctcatccccatgcttcaattacaagctgcccactgtcaccgtctcatgtcgggcagcacaggtgattacacaaaaccttctagcagagacaggcttgtcaaggcagtttcgttaagaaaagctgtgtttgtattctggcaactatcaggaaacgaaaaggatcttttctcttttgtttatacccatccgtcctaaggatagtattttctcctactccctaagagctcggagggtaagaatgactaccagttttgcaaatcttcaaaacagctcctaaaagagagatgattttcactgtaccacaggaaaaccaagccctggaaagcatggttaagtacagtgccaaaggcactgggccactcaatgaaatgggatccttctctggtgaagtcattgcccagtgtgtggcctgtggaagttactcattaaatactgggtacctaacttacctaggtccacatggtaatggaggcaggacccaaacgcaaatctgtcagccaccaaagcagccacctggctcttgccagaacactagcttcccccaggacctgaagccctggacttagaacaaatgccatttgtccatacctgcaactgtgtggatgccatttcttattcctgaaaatggtgtgtcacccttccagtgctgtgccacccttccggtgcagcggcgtgtcacccttccagtcctggtggtagagggaaagatcagcctctgcccacagaccccctcccgacccaccgtgctttgtaaccactgctcctggcccgggacttggttcagtaggagttctggtcctcagctcctgaccagctcacagcggctgctgtccacggctctgttctgtttctgttcttctctgttccagctctactgattcggcataggggagggggaaaaagtgtgagagaagagtaagacgaattttacgtggaattatctttcttacagtggttgcattgttctttcttgtgtaggtgccagcttcttaaggccaacaactctgtgaatgtgaagctataaaatatttagcgagcttatatttcagaaataagagtatacaatactgcgggggataagatttctgttatgacattaaattgccccaaaatagaaatactcccagttccctatgtactaacaattatttttcaacaaatgacaatcttaaactccctttgacaagagaaagctctgtttttttgcacgacttctgcagggtaaactgcttgttaagtgtagacttacaaatatagagacaacagatcttccgacattgcactgctgtcatataatttactgctttcttttcattttgacagtgaaactatagcagcatgcgaagtggttattccttatgaaagtgacatcatgtaactgctattatgagatattacatgaattggttatgcttttaccttgaaatggattttttaatatttcctgacttaatgaaaagtgacaggaaacataattaaggcaaagaagagaatctaggaagacattatcttgagttattccatggcattaactttatttattaaagtcgacatctcacacctacccacacgccatcttaaatcaagggattttggtgtgctttgcactgaagcatgtcaagatatgttttttatttaaatccactttctctttagggaaactgaggtacagaaccatctgagatctagagctaagtgtagatatgcctcatggagcgaggcagcttttcctgtatccacaatggaatacctcttgtgcctcctcctcgacccttaacaaggttacttaacctaacaaattgctcctctgagacagtagaactccatgaaggcccatgatatccaacccctttgatagggggtgttaaaagatggcactcattttcattgttagctgttgggatgaatagtgatactgccattgagcactcaccaggtgccgggcatgagttttataaatacatatgtaaatgtacacacatgcacatatatgcaccacctcacacagacacacatagaaacacatgtacacatatatgcaggtgcacatatacatacacagatgtacacacacatatacacacacgcacatgtatacgcatacacacataaacacatgcacatatatgcacaaacacacacacatacacacatgtaaacacgtagacacatgcacatatatacacacatgtacacgtgcacacactcgcatgaacacatgcacatacatatacacacacatgcacagacacacaaacacatccaatcttcaaccttctgaagtcacaattatcactaacctgcatgtgaggaaacagacaaagaaagggacaggtaatgtattctgcccaaggtgacactgtccgcgaggcatggacctgggatgtggcctgtgtcctgtcctctgcccctatgaccctgtgcccaagccctcccgcggtggctgagtagggcactgcagagcagagagggcttcatctccatctgaaccttaacctgactctcagctggaatctcctttccaaacaagagcatgagcctgtgtgggttcggagtggagcctggaaggcaccgcagccagggcggccacagttcatgccagctgttcctctcaacacccctccgtgtcgatggcttcatctacaacgagaaaaatagctccttatagggtggttgaaagcacgaatacacaagaaaatgcctattaaaatattggcattctagcctttgaaacagatgtgcttcagttctcacgtcaggaattatttttaaaatcctatttattcccattcctacgcaggggtcccccttcccaccctccagtggtacaaggatgccatctccatcagcaggctccagaatcctcgatacaaagtgctcgccagcggaggcctgcgcatccagaagctgcgtccagaggactccggaatcttccagtgcttcgccagcaatgaaggaggggagatccagacccacacctacctggatgtaaccagtgagtacacccaggcccacagctacctgacctggacgtatccagtgagtacactcagccccatggctacctggatgtaaccagtgggtacacccaggctcacagctacctgacctggacgtatccagtgagtacactcagctccatggctacctggatgtaaccactgggtacacccaggctcacagctacctgacctggacgtatccagtgagtacactcagccccatggctacctggatgtaaccagtgggtacacccaggctcacagctacctgatctggacgtatccagtgagtacattcagccccatggctacctggatgtaatcagtgggtacacccaggctcacagctacctgacctggacgtatccagtgagtacattcagccccatggctacctggatgtaaccagtgggtacacccaggctcacagctacctgacctggacgtatccagtgagtacattcagccccatggctatctggatgtaaccagtgggtacacccaggctcacagctacctgacctggacgtatccagtgagtacactcagccccatggctacctggatgtaaccactgggtacacccaggcttacagctacctgacctggacgtatccagtgagtacactcagccccatggctacctggatgtaaccagtgggtacacccaggctcacagctacctgatctggacgtatccagtgagtacattcagccccatggctacctggatgtaatcagtgggtacacccaggctcacagctacctgacctggacgtatccagtgagtacattcagccccatggctacctggatgtaaccagtgggtacacccaggctcacagctacctgacctggacgtatccagtgagtacattcagccccatggctatctggatgtaaccagtgggtacacccaggctcacagctacctgacctggacgtatccagtgagcacacccaggccgacggctacccagatgtatccagtgggtacacctaagctcacggctacccggacatatccagtgggtacacccaggctcacagctacctgacctggacgtatccagtgagcacacccaggccgacggctacccagatgtatccagtgggtacacccacgcccacggctacccggatgtatccagtgggtacaccttggcccacagctacctggatgtatccagtgggtacacctatcagcaaagccagacctgctagactgggccttcaaggtagaacttcccaaaatttgctccatgtactacacacagaaaatggtagtatctgttcagccccctgaggtaaacagaaggggtaatgtggccagaagtgggcagaccaggagagccagctctcaagcacacctgaagcctttgtgggtcctgtggggaaactgctgaggcccacaagcagcacagacggctgtcactccccggccctagtaccctcctcttctcagggtagcgttgcctcttcccgcactaagccctcctctttcttgaggagaagtagaaaaaactcccttattttctgggcagaattggaaagactattgagtgaatagatcactcctaatctttttcttttgatctttttttcctattttttacattcattctctattttacttttattgaacaattgtagttcttttgtgagtttcttttattatcccattaacagaaataccttggctctctgtctttgaaaaataaactcaaggtaaaggttttcattgtttctgtgggttttctttttaatcttccatggttgtataatactgttcttctaaaatgaagtagaatctagtgattatggaattataccttttgtgtttgccctttcgggagcaaaatgctgatatcctcaggggtgagagctgttggagagagcaaatcagtgtcactgtgtgcacagccaagggctcttcccacccacagcctgcaaggagactgaccaggtgtgtagcaagctgtgcatgtgtttcggtgaactaggggtcccttccttgaatcttgccctcgggtcaaatttgtctttcattttggagcttaggaaaccaatattgcttcaagcagtagaaataatatggaatgctcaagtcagaacatgagtcttgattgattagaattatttgaagcctatcttgcaatcgtgagctgggacgttcttgagcagggattgacaagctttttctgcgaagggcctaatggtagatatttttggctttgaaggatgtggcctactcagcattgctgtagtaacctaagagcagccacagttctcagcacatgcgagtggctgtgttccaataaaactttatttacaaacacagggtgcaggctgaatttggcccccaggttgtagtttgccaatctccattccagtgagagacttaggaatgagaataaaaaagaacccagagaacatctctgggtttctctcagcctcagttttctcatccattaaaatggagctaaccaaacccagattataggattctcatgagggtcagattggaaatgtaagtgaaagtgccacctgcactgttaccacggcagtgagtgagtgaacaaacaaatcaatgattgtgattatgttatctgttttgtagtaggaggttttttgcaaaatgagttttttaattaaaatacccttaatgaaaggaaaatgtgctttaaaaaatcgatattgatttgctcatttagcaagcggctgctgagcatctgtgtcgggcactctggatgaggctctggggacacggctgtgaggaagacaggtgaggttcctgtgcttccaggacagagggtctgcagggaggagaaaggcagtgaaggacgagatgactccagccagccaggggtgctgcagaaaaggggagcaggtgcggtggcatattgagccggggcctcccccagacagtgtggctgccgggtggggcttctctaggagagatttagaaggagcaggagtgtgaactcttggggacatgcgcattgcatgggctggaggggacatcaggtgccttggaggagcaagctcggcatgtgtgcaggtgaagggaggcggataggttggggctcagtgacaagcagggtggccatgacgggctggagggtggagggataggcaggggcagaggccgagaacaggaggagcctcgggagctgcgagcaagcagagaagggacatgaaagcctttgtagctttcaaagggcagcccaaggctggctgcctcagggaccctgacacaggcacagaagtgttgagacctgttagggggcctgcggcatctggcaagacctggactcgggtggttgcctgcgaggtggagagacaaggtcagcttcaggaagggccttggcagtgaagtttctgggacttgccatggtccatgggattctcagcaggtgcaggcagaggcggcggctgtgccctgggtcccgtgaggtctactcacttctttccttgaggggtatcagcccagggaccctcacagaagacttgagagacacagatcactgttgtacggggggttccggttaatcgttattgggtagcacagagttaggcgagccctcgctgaagccatcaggagctcctcctgtctttcctcggtctgactcagggctgctcggggccgtgaccatcccccatgaacaagaagaaacccagcacttggggatcatgacacctcccagaaatgtatctttatggaggtctttgaaacctggttattttaactctcagaacagatcctagaaagcatcctagaaagtgtcatcttgtggatgacattttgtattcaataattagcttttttttttgtttttgtttttgagataaggtctcactctgtcacccaggctgtagtacagtggcacgatcatcactcactgcagcctcagcctcctgggctcaagcgatcctcctgcctccacctcccaagtacgtgggactataggcctgcaccaccatgcctggctaatttttcatttttggtagagacagggatctcactgtgttgcccaggctggtctcaaactcctgaactcaagcagtcctcttgcctcagcctcctgaagtgctgggaatataggcatgggctacctttcatttaaagaacaaaagcagtcttttggctgatctaaataaatgcctctcctctctttaatattcatcaaaaactgttcttcctgggcccctgcacgtttccacttgtgtatctattacatcgtgacgctgtattttctctccaggttgtaaacaaagatcggtaactcctgggagaggaacagtggagggctgccgtccctcctgaacagtattccttttgtattgctacagttacctctgtgattggctctctaaagcccgtgcaggatactctgccaggctgatgtgagcctctcaggaacaaggccctgatcatttcatttactcctcttctcagatatcgctccagtgttcacccagcggccagtggacaccacagttactgacgggatgacagccattctaaggtgtgaggtgtccggggctcccaaacccgccatcacctggaaaagaggtgggtagcatccactgcccacaacagcatggcccatgtagaacataacctatcgggccagtgcttgcttcttattcactctcttgtttattcacttatgcattcactcaatgaagattaaataactcttattgcagcagtccccaacctttttggcaccagggacctgtttcttggaagagaatttctccatggtctccagtgggggctgatggtctaaggatgaaactgttccatctcagatcattagattcttctagggagtgtgcagcctagatccttggcatgcatagttcactggagggtgtgcgttcctatgagaatctaatgctgctgccgagctgacaggagggggagctcaggcagtcatgcacggtggccaccgctcacctcctgctacgcagcccagttccaaacaggtctgcagcccagggcttggggacccctgatttacagaatgcctaccaggtgcaagataccatgggcacaaggataaataggacagacaagatccctgccttctagaaagggaaacacacattagaaaaagagaaggattgtgcaaatgtcactcttctctatccacgcccttcagagagtgcctcaggcctcctcgggccttaccgtgtcaaggactggatgtgaagtcactctgctagcactcacttttcccactgttaagtggagctcttccttgtgacattcagaattaaggatcacggcctttgttttgttgaagaaagatgcttccagggccacatcgttccgtgccttctgcagtcaacctgggacgcttcagcccactgtgggttcagttcctgggaaggctgcctttgcagttcccatagcccgttccatgagggccactgaaggaacagcacacagagtccatcctgaacaagtctgtgcttagccttgttgattcacatggatgagctcctcatacttgctgggctgtatcgggctgacatgccaaaagccttatctttctcttccttctggaaaaccacctggcagcttctcgactctcagaggtacaacccctgcactcagacacagctcctaaagatctgggacactacagatcaataacagggctgggcttttattctctcttgttttcctgcctaattttgaacataatagctttatataaaaatgtttcaaatacatgcagatataaagaaaactaaaaaccgatcacccaaacatagcaatcacgttcatggatcataatttgtttaaccaaatctctaaatattgagcaagtaggatgttcttggtttttgttattctaaacagtgctagcaggtactgcttcagttatttcttttcctacaattttcactttattctgattatttccttaagttatttctttgttgtattagtccactctcacactgatataaacacatacctgagactgggcaatttacaaagaaaagaggttgaattgactcacagttctgcatagctggggaggcctcaggaaatcatggtggaaggtgaagaggaagcaggcgcatctcacaaggctgcaagagagagaaagagcaaagggggaagtgccaaacagttttaaaccatcagatctcatgagaactccctcactatcaggagaacatcacgggggaaccaccctcaggatccagtcacctcccaccagattcctcccccgacgtggggattgcaattcgagacgagacttgggtggggacacggagccgaaccatattacttgcttatggctctaaccactatcttcatttccttcaagcgttacgactgtaacatgcctcttttctccactgttctttagaaaaccacattctggccagtggctctgtccggattcctaggttcatgcttcttgaatcggggggtctacagatcgcgcccgtcttcatccaggatgccggcaactacacctgctatgcggccaacacagagggctccctgaatgcatcggccacgctcactgtgtggagtaaggagcagccctcgcacgtcggccttctgttagccacggtttaatcatcacgtcatcgtgtgctttggggatgtcagcatgcccttgggcttgctaatttaatcaaaagagaatgattatttttacaactaatttatagaaatctgttgagaaattaaattttcaatgtctaaaagaatacctagaaaatgtattcagagatttaataggggcattgcaggagagacgaaagattgactttgtaaagtcagtggagatattacacaaaactagctcaaatcacaaaattgataggttggttaattttataagcattttataagaaaattaagaattaaaatcctaaagaagtaatattttgctaaacatttgttagggacaactaaaacacttctaatacactaaccatcaatgtttcttgtatgttaggagtgaactgaaagaaaatcttccgcttttgctaaacaattgttaggaacaactaagacacttctaatatactaactatcaatgtttcttgtatattaggagtgaactgaaagaaaatcttcagcttttgcactttttaaaatcaagacacattttggaaatgcagagtagttttctggagcttaaggattggaccaaatggtcccccattgccactttttaacttcaattgccaatacactttctcctctctgtctcatctcaatctgtactactaaaaactcatattcaaaaagcaaaagaatgctcactcagatttttacaaatctatctacatgaggagagaaagttttaacttgcttgagggagtaatttgttgaaacgttattcttccagaaaaagtaaatcattgtgcttcatttcatatttgtctagcattttctatcatatggttggtgtccactttgataaacgactcttcctaatttgtaaaatgatcatgcgtttaaaggaaattaatccaagttcccactattctgtcaagtactaaaaagcagcttttgttccatttggtggatgactctgtcagccacttcgttcattctgtatccctaaatagtaaccatacatttaacccatttatgcctgaggttgcagttttttgaacttttgtaatcagaacttggcgatgaccttgagcagtaggatattaaaaagcttatgaaaaagtggtatctgaatctctgtagatcattcgccagaaaattttgtggatctgctgagattcaacattatagcgacactagcctgactgggataacgctttggtggctttacagaacattttcacacactctgcccactttaacctgtacaactattagtgacgtaagcattccctgccatagccaggaaaactaagatgcagaattgtttttctggactcaccattagcagaggtcaggcttgccctcgaacttagccttgtgactccgaagttctgggctctgttcctggaagcagagcaggtcccccttagaggtatgggtgctacagtgacccatcgcacaggcaagctgggggtccccatcccgtactggcttgggggaggtgggcaagtcactgcatctctgagcgtccatcttccttcctgaaaactgagaatagtaatatttagccctcacaagagtgtcttgaggaataaacacaactcaaacaaaaacacttgacagactcaaaaagtaccatgcagacgctagaaatgactagaatgatggtcatctagggagagaatctaggttttattttagagcctagaacctcatccacacctgcatggggtggtcggcattcagttacttccatggtgtttgaggttaaagctgatttaggaggggtgggtgggttgacagactgctgcaatggtttacttatttgcttgtttttaactcccctagcatttctgagagtgatccatttacactcattctgccaagatgagagaaaactcggaggttgtgatgtcagatgaccagggcattatcccccctgagggcagaaactgtcaaacttgtcatttcgtctgactcgtgacttgtgtttttttcagatcggacgtccatcgtccaccctcctgaggaccacgtggtgattaaggggaccacggccacgctgcactgtggtgccacacatgacccccgggtttcactccggtcagcacaatcagttacaatgctttggggcttgttgatattctgtgagtttctgaagtgaagttgagatgaggaggaagaattgggggaacttttgatttcagcagcaggtccctgattacggtatcttctggttgtgggcaccgtcattaatcatgcaaatcccattttccactccagccttatgtgttatttacagtgagctatgttccacttcatgacgttaatgctgcttttcatgatttttcctgccaaggttaatacactatctgtaaaacgtacttgtcagaggctgatactcaatgagagaaaaatccagggggatcgactaggattcagcattgtttacacgggggctgtgccactcccgggagagttctttactctcgggatagtttcatcgtgaaatggagggggagggagtcctgtgcatgggacaaagtcacccacagcccccagtgcactaataggaaggtgcatgccaagagggaggccagatgtgagggttctcttttttttttttttttttgagacagagccttgctctgtcacctgagctggagtacagtggcattatctcagctcactgcaagctccacctcccgggttcacaccattgtcctgcctcagcctcccgagtagctgggactacaagtgcctgccaccactcccggctatttttttgtatttttagtagagacggcgtttcaccatgttagccaggatggtctcgatgtcttgacctcgtgatccacctgtctcggcctcccaaagtgctgggattccaggagtgagctgccgtgcccggccaagggttctctaaaggaatgccgacatcctgtctttgtttaaattcgggccaggaaagtaactgcaaaatatgagactccaggtgaagttgtggtggcagacaggtgggcatcagtggggagctgttccctgaagagcagccaccttcaggataattttaaatttttggaatcagccttgaaaataaaaaaggaaatatccagtcatcagagtatttccactctggccttagcccagaaggggcacagtgcatgagtcgaatgggcagactactcaagatgccctgctgctttctggggcctctcaccccgagcagaggggacagctgtgggtgcacagtcagcagcgggacgcggagactcggctgttctctcgcgcttcttgagcgggtgtttggccaattgtaaatttccatgtcgccacccgactccctggggtttcccagggctcagaatccaaatttggtttaggtacgtgggtgccgaatgcaaaacaaaacaagcaaaacaaaaaccagcaagtgaaagacgacctaggacccccctgggggccaccctggagacggtcgtcaggcctcggaaagagctccttcctaaatgatttggagtatgacttcaaggaagtctgcttttctgctactctgacagctcagaaagaaccccctcggatccctgtggtttcgtagtagcttgttatatgtgattaaattggaggccccttcctcagatggaactgggttactcgctctcggggtgcccctcgtcccagggttgctctgccctgaggagcgccaggctgtaagtgaccagccagccagatgcgatgccccggcgtgagcagtctatccatctccctcttgtggaatcagccctgttctatctcagggtaattgctgagaaggtagtttgtaaatgtctgtgcttatgactatgaagtctttaaagaactgggcacatttgcaaaacccgatcaaattattgtggaaaagaaaaacagcactttcattccatatagcaatgagtgctggccctgcccgtggtcatctaaagactgggcaggctctcaattgattgtgtatttgaaaagaaaaatgtgctcaaattgctacagatagattaaatgagaaataaatgcaattttaaggaccatctgccagaatggtcacattttaagaaagtgtgtttttgaagggtgattttttttttcatgagttgggcaattccactctgtagattttttttaaacagtcgttgcctcctgtccagacaacactcttgtcctccaggagcatttaccggggcaggaatgttgggtgcagttttcataggtgacaggtatgcccgtggttctacagacttctcatctctaaaacacaaggtcagacaggcagggccagtcattttcattgccctgtttgtaacctcagcatgtgtttttgtattatgaccaagatttctggttgcttttcttttttttattattttttggtttaattcatatgccataaaattcactcttttaggccaagtgcggtgactcaggcctgtaatcccagcagtttgggaggccgagacgggcagatcacttgaggctaggagtttgagactagcctgggccacatggcaaaacctcatctctattaaaaatacaaaaaaattagccaagcatggtggcatacatctgtggtcccagctactcaggaggctgaggcacaagaattgcttgaacccaggaggtggaggctgcagtgggccaagatcatgccactgcactccagcctgggccacacagcaagactctgtctcaaaaaaaaaaaaaaaaagaaagaaagaaaaagaaaagaaaaatcactcttttaaagagcacagttcagtggtttttaaagtccattcacaagattgttagttgcttgctttttaagagacagggaaggagcagtgattctgtcactgtggggtttgtaactcaagaccctttgcttggcccacagctacgtttggaagaaggacaacgtggccctgactccatcgagcacgtctaggatcgtggtggagaaggacgggtcccttctcatcagccagacgtggtcaggcgacatcggtgactacagctgcgagattgtttctgaaggagggaatgactccaggatggcccggctggaagtgatgtgagtactgagacgtttggtgttagccagtccgcggttttctccgttactgtgcccctgttagtgactgccacttcacaagtgtcacgcccggcttgtgtcccaagtcagcggtcagaggccagcgcatcatgctgcataactacatatatggacaaggtttttttgtggtttctttcaacttcggaattgagaagtttcgtttttggtgtagatggtgtgatcattggtttttatttcagttgatcctttttgtcatatttttcccgtggacaccttatcctgataggccctgtttaccactctgcgcttaagtagcaagttcatttttccacataatacccttgagagcctccagtccatgagagatgctggagtgggactgctgaggcgaggtcgttcccgtgaaagccacctagacttggggtttcagtgagtcccagctgcccctccgtgggtaaatagatactttaagttaagtcttgtgaaatcttgaaaacagaaagcaactgcccgttacttccaatctggaccttcctgggggttccaaagagcccaggcgggaaaccgtcaatctcccccgtctctgctctctttctccctccactcccctctctattcatggagcaggaaaccaaaatacctgctgacacattttatttttctgacatgtatttatttgctttttaaaagttgtgccatctcaatattccgtgagtgcatgagtacaaaaataaaacctgaaaataaagaatcccaaccgagcactcatcaaggcagtggccagctccagggacacacccagcgcatccgtccctggtcatcgtttgacatgctgggcctttcgacaaaggcaatcttgagagatttttcctcactggaccctgccccctttgatccaggaaagattctgtattcaaaatcattccccacaaatagaatttgaacactccgagtataggagccgtgactcattgatccctgaatcccaagactccagctgaggggattaaaaatgaaaagaatgcttgctaagtgctaagcatgtggcttctgtgtctgccacacgcatgtggaaatgagtgaactcacaaacagctttcctgtagtccctatttgtggatataaaaggttcacgatgtgtagcagtcagtccggaaggccctgtggtgtcatcagtacctgaaaaacatcccatcccaactcctgttctgtctccttccaggatgaccccttgttctctttagatagcagaggtaattgtggttagttaggaagcggcaggagtccccatggctctacagaatcagccggcggcagtggtgcgggggtcctggtgctgcagctgcaaagctgccacgtagagggtcctccagagaatcactgagggtcccggggctgaggctgccacgcagagggtcctccagagaatcactgagggtcccggggctgaggctgccacgcagaggatcctccagagaatcactgggggtcccggggctgaggctgccacgtagagggtcctccagagaatcactgagggtcccggggctgaggctgccacgcagagggtcctccagagaatcactgagggtcccggggctgaggctgccacgcagagggtcctccagagaatcactgagggtcccggggctgaggctgccacgcagagggtcctccagagaatcactgagggtcccggggctgaggctgccacgtagagggtcctccagagaatcactgagggtcccggggctgaggctgccacgcagaggatcctccagagaatcactgggggtcccggggctgaggctgccacgcagagggtcctccagagaatcactgagggtcccggggctgaggctgccacgtagagggtcctccagagaatcactgagggtcccggggctgaggctgccacgcagagggtcctccagagaatcactgagggtcccggggctgaggctgccacgcagagggtcctccagagaatcactgagggtcccggggctgaggctgccacgcagagggtcctccagagaatcactgggggtcccggggctgaggctgcgaggctgccacgcagagggtcctccagagaatcactgagggtcccggggctgaggctgcgaggctgccacacagacggtcctccagagaatcactgggggtcccggggctgaggctgccacgcagagggtcctccagagaatcactgagggtcccggggctgaggctgccacgcagagggtcctccagagaatcactgagggtcccggggctgaggctgccacgcagagggtcctccagagaatcactgagggtcccggggctgaggctgccacgcagagggtcctccagagaatcactgagggtcccggggctgaggctgccacgcagagggtcctccagagaatcactgagggtcccggggctgaggctgccacgcagagggccctccagagaatcactgagggtcccggggctgaggctgcgaggctgccacacagacggtcctccagagaatcactgggggtcccggggctgaggctgccacgcagagggtcctccagagaatcactgagggtcccggggctgaggctgccacgcagagggtcctccagagaatcactgggggtcccggggctgaggctgcgaggctgccacgcagagggtcctccagagaatcactgagggtcccggggctgaggctgcgaggctgccacacagacggtcctccagagaatcactgagggtcccggggctgaggctgccacgcagagggtcctccagagaatcactgagggtcccggggctgaggctgccacacagacggtcctccagagaatcactgggggtcccggggctgaggctgccacacagagggtcctccagcttttgtgtacgcatggggcagccaggtttcccccagcccctgccttcaggcattggagcctacgaccctgggttctttctgcccttcatgagccccagccatccactgtctctgcggttgggtgctgtcatccgtgggcttccccggaggtctcctgatcatgcaccccttagcattcaacgacagtagcacttcctgcggttcagttaccaggatgctgcctgcagttcttccctgcgcgcagctgatcctcctggtagcactgatcacgctgcagaggacgaccatatcttcatggctccctctcctcctggaacagaagcaccttggtggcactgttttgaattttgagtgcctgatgtagtatttgttgtataaccgttgttcaataaatatatgttggttggttgctgcctgcgtgcatgcatgaaggaatgaatgaatgtgtgtctgccttggtggcccattggcgggcctccttctgttccctactcgtaccttgatgctcacatgccctggtttccccaccatgggtatacaagtaagctcaggtcgttctaccaaaacccaaacagtgagtacccaaagccctcatccagccctgctcctgcctctttcctccttcctttcgggtctcagacagaggattttttttttttcattttgataatataggaggatatggccagtgagttcctaggagctgttgtattatgcacatttttaaagctacctttgagaaccttagatcatccatcgttggtatcaaataaataagcgttagcagttcataaagactctgtcagcagaagccaaattgcatacttccaatatagcccattctttttattctgcacagttttatggtctactgatttacatgtcttccctactatttgcttatttgatttcctctaagtaaaatacatttttcagcaaatgttgctgtatgtataaaataataggctttctctaacggtaaaacatctcatctctaaatatagaaatctctgcaaatttgtgattcaaactaatttaagtacaaactggttacagaactgatttggaagacagttgttcctcgtgaattgttagtgtcacgaaggctcctctatcccaaacctggatgaattgggaaaggtgttccttcatggggtgtctttagatccaacagagcttgactctacaacaataatggcaatagaatgataataataataacccgtgattgcagggcattctgtccttcttgggtaactttcaaactgagctctgtagtgtttccatcatttactcagataaccaaaaaaaaagcaagagaaaaatctcatattgccaaagggaagggactgagaggtgcttatgactaaacaatgtccttcagaggagcctgaaagcctgttttctccttgcctctccacttcagttaaaagctgcttcattaaatatagaaattacgagcatctgaagtgagcttttcaaaaatagaccagccgttggcctcttctcacgtctgtttgccccgagttttacacttagcactaagcttcacctcattgaggctgagtggaggggcggcccccacacccacatcacacccacagcagtcctgatggggctgctggacagcagtggggccaataggagcaaagggctgcacaggaggccctgctcacctttcactacttgtgtgactttggacaaatcccctcacttctcagcttctgcctctcaccttgtagactgggcatggtatcattcatctcaaaggacggctgtgagggcggcacccacccgggtttgtaagatcctgttgtggaagccagttggggagggatgctctaagtcctagctcttcgtgctttcttaccatcttatactagaatgctgttcccccctttcctaacagcaccctgcctcctggggctgggaactttctagccctttaccctgcattattctgactacattctatgaccttctgacactagactcgagatgtgtctgtttgctgttgagccctcaatgcctggaccagtgccaggtatacagtaggaacctaataaatgtctgggtaagcctcactccacctactgagctgaaatgagacggtgtcttttgccctactgaggaggaccaatttaggagggctctgccttcatccccccactgagagaagaggcttctaaactccagatggttccatgaggcagcctgtaaattaacaagacaagtcatcattaaatgctggtcaccccttgttttagtagcgtctttgctctagttttctagtgccatggggacaggagccagtttccaggatgacttcatattccccaaagcatcttcctgtattgagcacaccagagggaccaggctcctaaggccttatggattgattaattgttaaatcatttaaagacccaattagcatttcatctctcctcctgaaatcagagtctaattctcatgggcctggagtacagagaaaacccaatttacagagctgacttggagaccctgaggcattgggagaggtttctttctataaaaccagttctgacagagccctcgtaaggagtgaagaatttaatactgtttcccccagagttatcaagccctgtcatcttcatcctcagagtgaagtcaaagaagatgggtttgaccaagtcatcatttgtgcattaaagggccaatgctttttatgtagaaaaaaagtacttatctgatcctcttctgccagagcaattccccctacagccacaatttcaccaattgctttctttcgagtctttttcaaaactgtttttctcacacacaccttgcttcatctctctcccgtactgttgggtttccgttactgttgttgttaatttctgatattcctgaggtgtcctgtgcctgacggtggttttccccctattctctttcaattacaaagtgactcagcactgggcttcgcttccattgttctctgggacctcttccatttatcagcctctgtgcttatcactgtctgtgagtcactctactgatcatttatctcctttcaaagctggcagagtaatgcttcgacgcaatctatccccattagataagattttctgaaatggattcagaatatattaaagcctcatttatctgttattgatgggttagtcaaggatctcacaaagcttcattttccaaataaccaaaacttatcatttaaagaaatagtggctggccgcagaggctcacgcctgtaatcgcagcactttgggaggccgaggcaggtagatcacgaggtcaagatttcaagaccagcctggccaagatggcgaaaccctgtctctactaaaaatacaaaaattagccgggcgtggtgttgggcacctgtaatcccagctactcaggaggctgagacagagaattgctcgaactcaggaggcggaggttgcagtgagccgaattgcaccactgcactccagcctgagctacagagcgagactccatctcaaaaaaaaaaaagaaagaaaaaaagaaatagtttatatttccagaataaggcacgccatcttctattgcatgcctcaggtattgcacgtttgtttttgttatttacaaactggaggtttgcagcaaccctgtgttaagtaagtctattgatgcaatttttccaacggcacctgctcacttagtgtctctggtcacattttgggaattctcacaatgtttcaaactttgtcactatgattgtatctgtgatggcactccctgatcactgatcttgaatgttactattgtaattgttttgggacaccatgagccacgccgatgttaagatggcaaacttaagctataaatgccttgtgtgttctgactgctccaccaacaggccattccctgtctccctccgtctccttgggcccctgtattccttgagccccacagtgtgaaatttggccagttaataaccctgcaaaggcctctgagtgtccatgtgaaagagagggttgtacgtctctcactagaaagcagactggaaatgatgaagcttagtaaggaaggcatatcgaaagccaagacaagacaaaagccaggcctcttgccccagttagccaagctgtgaatgcaaagggaaagttattgaaggacatttaaagtgctccagggaacacacaaatgataagaaagtgaaacagtcttattgctgatgtggagaaagtttgagtggtctggagagaaaaatcaaaccagcctcaacattcccttaggccaaagcctaacccagaacaaggccatagctctcttcagttttgtgaagacagagaggtgaggaagctgcagaagaaaaattggaagctagcaggggttggtttgtgagatttaaggaaagatgccgtccccataacataaaagtacaagataaagcagcaggtgctgatggagaaacttggtaagttattcagaagacctagctaggaacagtgacgagggtggctacagtaacaagaaatttgcagtgtagacgaaacagccttttatgggaagaagataccatctaggactttcctagttacggaggagaaatcaatgtctggtttcaaagcttcaaagggcaggctgactctcttgttaggggctaatggagctggtgactttaagttgaagccaacactcatttactgtgctgaaaatcttagggctcttaagaacgatgctaaatctactttgcctgtgctctgtaaatggaacagcaaagcctggatgacagctcttctgtttacagcatgttttactgaatatttcaagcctacttttgagacctgcagctcagaaaagaaaaattcctttgaaaatattactgcttatggacagtgcaccttgtcatgctagagctttgatgggaatgtacaaggagatgaatgtgggtttcatgcctgctagcacaacatccgttctgcagactgtggatgaaggtggacttttgaccatcaagtcccattatttaaggaatatatttcataagactatagttgccatggatgataattcctctgatggatctgggcaaagtaaatggaaaaccttctggaaaggattcaccattctagataccattaagaatgtttgtgggctgggcgcggtggctcacgcctgtaatcccaacactttgggaggctgaggtgggtggatcacaaggtcaggagatcgagaccatcctggctaacatggtgcaaccccatctccactaaaaatacaaaaaattagccgggcttggtggcgggtgcctgtagtcccagctactcggggggctgagtcaggagaagggcatgaacccaggaggcggagcttgcagtgagctgagatcgtgccactgcactccagcgtgggcgacagagcgagacaacatctcaaaaaaaaaaaaaagaatgtttgtgattcatgggaggagatcacaatatcaatattaacaggagttgggaagaagttgattccagccctcatggatgaggctggaggggttcaaggcatccacggaggaagttgctgctgatgtggtggaaacagcaagagaactagaattagaggtggatcctgaagatgtagctgaactgctgcaatctcatgatcaaacttgtccagatgaggatttgcttcttatagatgagcaaagcaagtggtgtgggacagcatctacttttggcaaagataccgtgaacattgttgaaatggcaacaaggccttagaatattgcatgaacttagctggtaaagctgtggcagggtttgggaggattgactccaattttgaaagaagttctactgtgggtaaaatgttatcaaacagcatcacatgctacagaaaagtctttcatgagaggaagagtccgttgatgcgccaggcttcactgctgtctcgtttgaagaaattgccacagtccccccagcctatagccccaccactccgatcagtccacagccatcaacatccaagcaggaccctccaccagcaaaaagactgtgactcactgaaggctcagatgatcaccttttttagcatgaagtatctttaaggtgtgtacatgttttttagacataatgctattgcacacttaatagactgcagtagagtataaacagaacttttatatgcactgggaaaccaaaacgtgtgtgacttgcaaattgcaatattcacttcattgtggtggtcgggaactgaacgtgcagtatctctgagacatgcctctctatcacaaggcccttcacattatgaaacaggtgatattgaacacaagagatattatcaaggggattttcacagaggggagagactgaaactgggaaaaatcaatatttccttccaatgcttgagtcctgtgatttaccaaaatatcacactttgccctgggccatcacactgagtgtgactttgagccaatggagtgacttcgggggacagtcgcagagaaggacgtgtgcgtctctgcacatcacgggcactcaggtcctcgggcactgccaggcgggtagctcttgccgcctacactaaacgcctcaagactagtttgctttctaagtttttaagtatttgtttttaatcttttaaaaaatctttttacatccctcaatctcaggctgttgcgaccgtttttgctgttgggtgtgcctgcttcgggtagatacttctcatctgttgcttgtggtctgctggcagggggaaaatctgaaaccactctgactagaatcacatcctagctgagagggggcagagggatggagggacatgtgtgagcatattccagggactgtgagagctgacccctggaggacagaagctgccccgtgagtagcctccatttaagtgagtgtctgcaaagcactgcagcctcaagagaaaggcagtccacccacctggcagatgggttgtttctgtgtgcactctcaccttgggctaagagaagcgtgatttgaaatcaagtgcaagaggccgcattttcacctctgtgagaaagacagacttttagaatttagaattcgatcaaacataacccccttgaggtcatcagagaaagtgtgcagagacacagcagcttgtcaggggccacaggtcacccatttctgttgtctcccaggagcctgttcacatcttatagcatatggtcacctggcccgagaatgtctgttttgcaaggtttgtcctgagctggctgtacaaccctctcctgccctggcttctctccaactcctactgtgtgtgtctgcagagctgcctggctcctcgagcctctaacccacctttagtttcacggcctatctcccatcctgactattacagatggtcatctgacattgtgtccagtctgtgagaacggcttccaatgagctgcccttggggtcccagaaccaatgtcaaaaagacatcccagaaattgtgaacataagctcattgctggtctctctgtgcaggccagtgcattttccctcaaccctgtctggcctctctgccacccagggcaaatcctgcattcctaccactctcaccgaccccaagcctcccagagttgaatcactggctgcatggttgaacctagtccccagccccctccactccccagaggtcagaaggctgagccgtcaccactggctcaaagccccaaccctcttatccccatgactggccttcccagcatggccagacccatcctggaaggatcttggggcccaccatgagtccacccaagaagcataagctcagctgtggtctgagaggttcaccatggtggcgaaaaccgtcccagtcactcaggaaactaaaacagtctggaagttccatctcagatcagatacattctttatgataaaccatcttatttggctatatctgtcagatttattcatattttcttttcaggtgggactttttcaacaactttggtttggtttcagaccacaccgattcagattgcagcagggggaataggaaatggggcttgggaggagtagaattgataactggcatttccgcctctaatggagattcggttattggagaactcaaatagaaatgacagctctgcccaggtgcagtggctcatgcttataatcccagcacttcgagaggccgaggttggggaggatcgcccaaggccaggagtttgagaccagcctggacagtatagtgaggccctgtctatacaaaaaataaataaaagaaacaaactattccttttctgattcaaaacttaattcacaattaaagagaaaacaagacgacatcctgggctcgcatttattctttatcgcactaatgtacaatgtagttgcagtctacattagaaatattagtatgcttataaatggtgcgtatgggttagagctgtttcttggggaactgaaagctcaaaacagcttaataaatttcaaaatgtaatgagtacatttttaaaattaaaaatatcaagtataattatggctttgtgttctgacctgtgtgggtcagcagtacctgatgtctgagagaccaaaagctggttagcggtgacccgggtcacactcagcatcccctcttcccggcactgcctggcagcgtttatggaggggcagccatccaggacagccccggaacagggtcctgctccggattcaggagacgtgaaggttcagtacagggcccgggcagctcatggttttaaggttgtagactcagccttggtagaaaccatgtagtagggttttgcagctttgtcactggttaagtcccagtaaaaactttttttttttttaactagtaacttatttaaagaatttattcgctttaattgcatttccatttcatagccttgctgatgtgttctttaccatttccatgggattttagtgagtggtttcaccacacttcctccaaatccccataactccagcagaagacataatgacaatgtaacctcatgctgtcaataaatgcggcaactgtgtggtctaagaatacatgcaggcattttcgctcataactctaaatggctagtgttggaaacattcccgttacatgtatcgggacttttcctgcatatgtggcatttccatgaccagcttctagttgtaaaaaacaaattgttgaccacgttttctcaattaaataatgtatgtgtaggccgggcatggtggctcacgcctgtaatcccagcactttgggaggccaaggcgggtgaatcacaaggtcaggagttcaagaccaacctggccaagatggtgtgaaaccccatctctactaaaaatacaaaaattagctgggcatggtggcaggcgcctataatcccacctactagggagactgaggcagagaattgcttgaacccaggaggcggaggttgcagtgagccgagcttgcatcacagcactccaggctgggcgacagagcgagacttggtcttataaaaaacagaaaataataatgtatgtgtaaacgtctgcgtcccctccccctatttatgtgacagcgtcagtacttgttttggtagctagcataagggttccatgaaattatgaccagaaaacaaagtaacactgtgaataatgaagctgggttttgtgtgtccttttctggggggaagagagttaatatttgtgtttgggcatattttatgttattcatttcccaaacatgacacagcaggacggtctgctgtaagagctcaggctcaccatggattctgacatgtgttttcctctttttccttttcatcccattcaattcaagtgaactgcctcattcacctcagaacctcctggtcagccctaattcttcccacagccacgccgtggtgctctcttgggtccggccctttgatggaaacagtcctattctttattacatcgtggagctctctgaaaacagtaagtagcaaaatgaaactgtcaccatggacgataatcagatttttgtgtgtgctcttaatgtccttaacctttacttctgggtcagacccaaaacaactactaaaatgctgtaatgctttacagggtttcaaacacagcctgccctttaggaaagaaaaaaccatgcaggacctgagagagggaagggaagaagtccttagttagaggggctcttggtggagagtggatttggggccccatgggagggctgtgcacacagggctgccccgcacagtgtcactcccagggcgagctggaaatgggttaacaatgcctgccacctgggtgacttgagagttcaccgtcgccgccactgctcatgtctgtgggaggttttctccggtgtagacgtggtgtcaagtgttcagcaccctcttcctgactcaccttccaggacccctctgcccatttaccgccatccttggaactcttctacatgaaacatgctccttccgtgggccactcacagccttggctctcctccagccgccaagccctccttcccttctcttcccagctggctgggtgacgtgtgccccgccgtgtgcacccactcacgcctctccgctctccctggaatctcttcctgggaaatcgcatgcactcctgtgattttaagtggcatattttccttgatgactcgaacatttgtatccttcacccaggattccaggatcacttatggggcccagcaacttgacatctgtatcgggttgtctcacggcctctccagcttaacttcttcccactgcatccatctttttaatgtttttttttttttttttttttttttacctcactcctgcagccacccaaatctctgctcccagcaccccgcatttctatattcctctgccagaaccctaggaatggtccccaattcctttccctggaccccagcccccacctccacaccccctgcatcagcagtcctatcagtctgttaactaggattctgatccctttcctctctgcctcagaccactggtacctctcgccaggaccactgcagcagccttccagccggccctgtttcctcatccaaaccattcacctgccagcagcaacactgatcttcctgagatatacccagaccaggccactcccctgtccacgtcctgcaggggttcctgctgcgtgcaatatagaagccaaatgcctcgctccctgtgcagcctcgggtcaccctgggctactgtgctctttctccacaccggtcagccacacgggacacatgaaactcaacacggattttatgttgactccctgaatgggccaaatatctcatctcatggcatgttccttcccctggaaacccatagagctagattgtcacccttcatgatagataatccattacctccacaaagaagctctccagcacgccagcccgatttcaccttttgttttttgtttgtttattttgagatggagtcttgctctgtcgcccaggctggagtgcagtggcatgatctcggctcactacaacctctgcctcctgggttcaagcgattcttctgcctcagcctcccgagtagctgggactacaggcacctgccaccacgcccagctaatttttgtatttttagtagatattggccaggctggtctcaaactcctggccttgtgatctgcccaccttggcctcccaaagtgctgggattacaggcatgagccaccgcgcctggcgtccagtttaaccttttaatacgtaagctgccggcctccctctgttatcctatctgtattagtcggttttcacactgccaataaagacacacccaagactgggcaatttacagaggaaagaggtttaatggagaactcacagttccacgtggctaggaaagcctcacaatcatggtggaaggtgaaagtcatgtctcacatggcggcagacaagagaagacagcttgtgcaggaaaactccccttgtactaaccctcagacctcgtgagacttgctgtcaggggaacagcacaggagagacctgcccccatgatccagttacctcccaccgggtccctcccacaactcatgggagttcaagatgagatttgggtggggacacaggtgacccacatcacccatcatttattccagatgagggtctccttccctgagcctcccccaggcagagccagatgcaggtatcctggctgttaacacgatccactttattcggcctgtggttgtctctggatgatactggtgttctaaacgggtccctgttttcaggacacctaggagtggtgcactctcgggtaccctcccctgaaacccagctccccgtgggtccctggtgctgctcacttttctgggcagattcagcctgagttctgccgtggctcttcccagctgatgtcagcctgtacacgcccccagcaattattgagataactcactttatttctcctaattacctttctacaccctcgcccttccctgggggttcccttctgataatactgcatgttcacaccacagccacacagtttaatccccatttcatagctacgggaatggatgtgcagaggctgtaagtcactgtcaactgcccagggtcacatggcgatgggaggggaagatgggatccctgtgctgtctgactccagagccggtgctcatgacgagtgtcaggcatccgcagaggagccttcggaagcagagtgtgctgtcctgcactacagcggggcttcagggagaggccacacttgggcgttggtctgtgtggacgtggaggaagccactctgtgaatctgaagaaccattatttgagttctgcaccacgcaaaccagttcaccgagggaaggcccagaggcagtatgttattccgggtcttaggcttctaaggttacaccttccagtcctgggcaccacctcggagtgaggccagagtccaggcccttctcccccttgcaggggcatctctgaggccggagtccaggcccttcttcccctgcggggggcctctgcaactcccactcgggcctctttcctcccagagatggggcaggatagaaaccagcgtgtgtgcagacggccatcttagcttccattcaacggctctgaccgaacggggaaggccagggtgttactgattcagataacttctgagagtacagaagagtttcctgaggatggcgtggccatgctgcctgtacgtaaaacaggacttgacagtgatctggacggagagaatgggacaggggagagctcgtgtcatctgaattctggttcgcatccaccctaaggacagcccccatcaggcgctgtcgcctcgggcttcaggactgtgtctcctttgtcttcgtgctcctcattccctgcacttagtacgtactcagcaaatgaggtgaaattcatctctccagtggagtcctcttgtgatgcactgaaaattacagtcatggaccgtcttccaaaacagaggcattctaccttcccccgtttccatgaaagaaggcatggctttgagatgcctggccagcgctcttctcagctgatggcatgactggctcctccagccagttagcttgcctccatgagaagcaggtttcgtgtgtaactatccagccagccacctacctgttacagcggtgaagccagctgggcatctgctctgcactctgctgggtgctgggtgcagagctgacgtgatcagtgtccactgcgaacagcaaggagacagtcagaggcatcgatgcagcctccacgtcgcacgttcccggctaggtacgtacatagtgatgtgactgtatagaaggcaagtcagagaaagtcttcaaagaagatgtgacatgagacctgggccagacgggcgacgagggacagcatcagcaaggacccctcagtgccaggcccccaggctcagtgggaaacaactgcccgtgagatggggctggggcgttgctggcggcgtgtattggtgttacctgggaaagttcttcctccttcttggtggcttggatcaaatatcacttctgcaagtcccattacgcccaggcagaaatggcttttccctcctcagggctcccttgctgttctacatgcttccctttgcgcacctgcgacgtaactcctggcttgtgtccatctcctggcaagactgggaaccccttcagggcaggtggggtccctgtgttggtcctctgtgctgtgacaccagcacagtgcctggcacacacaagatggctctgtaggtgtccagctgcttaatttcactcagaaggggacagagaacgtcagtcacccatattagcctctggctctcctgaagctggccgacgttcccagctgtctttccttcagagcctggagtgtgggtattgtggcatgcagaatctagagtgggtaccatggttgcctcctgcctgttctgatttccactgtgtgaaggaagcccgtgaccttggctgaagcagcctgtgctgctaccagctggttggtccgtgtcttcctgctgtggcaaataggaagagtaccaccatcatctgggccagtggtctggtttttatttttattagcaacaaatgcccttaagaagcagctgaacatgctggctaattagagccagaaagaacagcttagcagcaagtgcactaaaatggaaattgcacttggcctccactcagcgtgtgcaagtggtcagcactaaatagcgccatctactaggtctgtccctccggctacttgggagacactccacagccagctcctcctggcaggctgactgggatgccattctcctggaagccggggatcctgcaggggccaaacccacatggtttagtggccgaggcaggcacttgatagcctctgccctgacgacattcctgccactgcagaagggcctcttccgagctctgtggagcagagcctggggcttgaactgagcctgcacccatgtacgggactcaaggtgcatctctggatgggagatacacgtggccctctgcaggcatgccagggtttgcctctctgagaagtttgatggttctcctgtcccaggtgcctgtttagtaagcctgggactcagagaggggcagtagtgtcctaggcctgggtcaaggcacccacctggtggattgaggagggcagagggtcaggccaggtggcggatgagggaagcctgggggatccctgcattgagagagtgcagggattcttgatggcttgacagtggggaccctgtgaccaggctgagaattctgttgaataatgaaagcatttggcccactctctaaaatgcttatcgattatgatcaaaaatgatctttctttgagattattatgatcctgtggagggagactgtcaggtaagaattgtgaaagactttgcagtgtgccataaaaaggattactgagtgtctcatctagcgcccttcagggttatctgattcgatagggacccgcgctttccatcgtctttgggctacttatctctgtaaattgtagaaatcttatagtagtgcactttgagtaatgcaaatttcttttccaaagaaatgcaaataaatgcaaattttatcctgtagaatataaatatggctattgctctgcagatactgacccgttttgcatctatttataaattcatttttgcactatcaatatgttgtgggctgttcactttctcttttgatacagttgaaacgtcttactggttccctcataaattaatgacaactaaaatctttgatacatgttgattctatcgttgcattagagccgttattttaccttcttaaaaatttattctttcacatgagtgagtcggcattgcacagtgttagaaatggagattttcgtttaatgcaacagttgccaccagtttccacggcaaccttgatatttgggagaggccatcctagttctcaaactgagcctctgcgtgttttccttgggctggacaaaggcgtcccatggctgaaacagaagaatggtggccttctaccagttatcaagaaaaattaagtctttttcttatgatttttttttcaaccttaacacctgctgttgtatgtcttgtggtaaatgcttgcaggtaacaaacatattaaacattcagaatccttcattctactcagtcctacggttagttttttaataggatgagtgttcgtaattgtgattccctattataccttgtaatatttaaatttaattaaaatgtaaaatacatttgtactttttattattctagttatgcatgctgattaataaaaatttagaaatcccttaaagcacaaagaataaaaacgatcactacagtcccacatatgttgaaagccagccctgcacccaagcccttggtccctcctccagcccttcctccaggacttggctccctctttatttcctctctgtgttctgtcttcaaagctctccctctctcctggcttcttctgcctcaaaggactgagctctgctaattacctgcacctcctcacttctcacgcattctatctactcttctctcctgaggccatattgtcgttgttgtaaaggacagagccagtgagctccactgagtccacatcccctcagcttctctgcaagcaatgctcttgatcactctccccacacagacctccttgttcccaggacttggcttaagtctttctcttcattcttccttcttattttctcctctctatccattttctctgactcattgaaggctctatttcccctcctgcccctaaaatgttggcattccctgctttgtctcactcacacactggtcttcttatcacacatgcttttctagggatctcatgttagtccatggttcacctttgacccacacaccataagtccctcatgtgtatttctaacctagacctctctgctaagcctcagattcttgtaaccaaatgtcttccacacatctacacctccatgtcccagggcttatcagactccaactctaaaatagaactcatcatctgaccccaaagttgttcctcttccaagttagagataatgtccaggctgggcgcagtggctcacacctgtgttctcagtactttgggaggccgagtcaggaggatcacttgaggccaggagtttgagaccagcctgggcaacatagcaagaccccatatctacaaaaaattaaaaaattagccaggtgtggtggctcatgcctataatcccagctactcaggaggctaaggtgggaggatcacttgaacccaggagttcaaggctgcagtgagccgcgatcgcaccaaggcactccagcctgggagacagaatgagacttcatctcaaaaaaaaaaaaaaaaagagaaaaacataatgtaattcttgactccttcaccattaattctctccaacaaatcaatcaataaattttatagggtttacctcatgcatttttatcaaatccactgccctgcccttctttgttcctgccaccactgaccctaactggctgttgcccatcactgtgatccatggatctgggatcctcaaatccatcctcccttgagccaccagagcgagctcagtagtacaggaacctcactgagtggtttcccctgcctgaagccttccagaggatctgcagagaacccaccgctggggctgggcaggaaggcttcaggaagcctggtactgtagacatggcccatgtcctccctaggttgccagccctacttcttccgtatagaggttctcgttccctgaagaggggattctaggcttcttagcatggtagcagcactgtttactatctgaccaccccctgcctctccgatttatctccagccactcaccattctgctttccttacttcagcaacaaggcattcctccggattccctgggcacaccagatattcagtgccactgcacctttgctcaccgaatctgggaattctcgccctgatcctgtccccctctgcctttgcctgatcagctcttactcagcatctccttttaggcattgcctctggtctcaaggtgctaccccatctcctcccctaggggtgccacacccaccccctcccctgggagcgctgtccccatcccctcccttgggggcgctgtccttatctcttcctctacttgcgttgtccccatcccctcccctgggggcgctgaccccaacacctccctcctgagttgcctcagcagtgctgaatcaaccaatgggcaaacagcctttagggcaccagcaaaggcaagacagcaacactaatgcaactatctagaaggcaatcatttgaataatctttctactccaactacacgaagataccctcctgtgtcttcattcaggaggttgagggttctgagtttcgggtcttctgagggttgttttagtttgtgtttcgactgctagtattcttgaacccattctgccaagtcggttggctttgagcactttctctgctatgatctgttcattttctttgccccatttatctatccaaggccttagggattttttttttttctgtcatttgtaacaaggattttttcagtttgcttttaccattaatgtttgtatattactttctgacatacagaagtgtttgacttttacgtagttaaatctattgatgttttcctttgtcacttcattacttttgtgtttggatatttcaacactctcaagcctaaaatgagtattcttataggtttttgccttgtttataaaggtttaatttttaatatatttaactctctaatttttctggaatttaggtgtgttatatactctggcacactacttttcctttctttcaaatgatccattttcccaacatgatttattaaataatctatttatttatggtgtctccctctttttatattcagaggacctgtttatacaaaagtctgcttgtggattatttagttccattgattcattatctctttttctgccagttttatagtattttaattgctttacttccaaaaggtgttttaataactgataaaacaactctcttcaacttttcagaattttgttattacttgtcatcatttattcttccagaaaaaactgaaattattttgtttcaaaagtagtctcattgcatttttaatcatgttaaacctataaattgttttatgagaagtgacttcttagtaattctggttttccgtccagaaaataatatgcatccctatttattcagctgtttagtgaggtttgcaagtttatacccataggctgtatacttttttgtcaaggttgtcctgagattttgactcattgctactgtaaatagcaatttttccccatttcgtcttctaattagttattgtaggaacataggaaaaccactgatgtttagatatttattttccattcagccatattccatattcttttattattctaacgacttttccattgctcttctttgctttcaaggtagacgatcatatcttttccaaataatacaaatgtattgttttctttttgtttttcctatcttgctgtgttggttggaataattttaaataattggcatagtaatgtctcttgtgtttttcctgatctcagtggaatgtctactaggattttactgttatgtgtaatatagattgttttttattgagatataatttgtatgtaacaaaatgcagggagcttaagggagttttgacaaatatatacagccatatagcccacacctcaaacaaaatacaagtcatttacaatactccagaaagttcttcctggccctttctagtcagtctaaccccttcttctgacttctgtcaccatagattaggttttcttgtttttgaacttattggaaattgttacgggatctttggagtgtcgcttttccagccagaaacctctgtggctggtggcggttttgtccgagttctcgtcttgtatccaggaagaataaggttcacagacaaatggagggtgaggaagatgaagaggagctttattgagtgtccggacagcccagaggagccccgcagtgggtggctgctctctgtaggcaagtcgtcccatcgtctctgcagctctcagcagagaggaggcctggagtggaatttaggtgtgttatatacacctctgctggcagctcatcccgacaagtgttcagctgtcagcagagagaaggccctggagaggatagtagcttctctctgcggctggtcgtcccagcatctgcagctctcagcagagagaaggccttggagaggttgttcaatgtctgcagctctcagcagagggtagctcctctttacagctggtcctcctgtcatctgctcagctctggctgagcccagggtttttatggccttcagaggggaggaagtgcatgcggattggtcaatgggtgaccatgagtgggcctggaaaaggcaccacaagttcccactccagccagggggactggcagccctgcccccagcctccaggccctcactggcctgaaggtggggcctcaccggagacccaccttcttctgcccaggagtctgtctgcctcctgctgccattcatggcactcatgctcgccctgactttgcccccagatcagagtgggtgccaacagcagggagcagccaagcagtgagagcaggcacttccaagcctgcgagggcagggggtcttcctgggtccccaagagtgcaagaatgcctgagtctgcagccgcgggttttggcagctgcagctgtgcccaagagggcagggatcctgcctgctcccagcccgccaagagcacaaggaggctaggatctgcagccacgacttgggcagggctcctgcctgctccatggaatgggaggcccaggtctgcagccacggtttgggcatctgcagcggcaccccgggagctcccgccccaactcgtaaggggcagagcttccacttgtccccggctcctatgggctccttggagcaagcggccccggcagcacctccctgcaacagctggcatgatggcagcggcaggctgtctagagcagctggctgctgtcatcaaaaggaacatgatactgacttgaatgagcagttttgtttatcatgtaatacattccttccattcccacttcttaggattttttaaaattatgtaggaaaatgttttatttctaagcaaattattcttaaaataacaaaatattacatttagaaatacccctacgtttatgtgagagaattcagaagatcaatacgcttcagcttttgggaattcatgcattcccaaggccctgccccctggacaggtttcagagctgatgctctgagggacgtggtcttcatctatgactctaggttccccagcctcaaacctgaaataatgtacttttccttaactcagaaagaagccctgttttctatgaattaggagttaatcccatatcttcatgttttctaacaatgtgcgggaggaacaacacctccgtatcttccgcatcgctcgctgtcttccacgtggagttccgtgcagtcggcgtctccactgcctagggagtgctggcttctctgggtgaatgtgggagcttccttttgcaagtgtgccatccatgtgtccctttatgccttggctaccaggaagcccaaagctaacctgagtgtctaactgaagtacctcagtcattccaactgcttagaacatctccatctctttgcattcttctcctttatgagtttgattttgtttttgtttgtatgtatgtcattgtatcacccaattttatgcagattttcactttagaatatccttaagctctctttaaaaataggagatatctctccccaaacacacacacacacacgcacacacacatgtatcatgtcaccatactttaagggcaggctcatgtgaaatgagccatcgaccttctttctctcctttagtttctttctccccattcccttgggtacagagcacagtcagttcacgcaagtctgcaaattgcgcatccactccctcctgagagcattagacaccaggagataccaggaagagcgtgaggtccattttcgaggcaaagaacactcacaaaattaaatcacaaatccaagaatatacgagggggcgtcgggtagtatgtgatcgcttgccaggaaagtggatctgaggatcaagaccgtcagggaaggggggttccctgtgggcaggtgtgggcatggaggcccttggaggtggaccctgagcagaatgttcaaacggtcagtattcggatgccctggtgcctcggggcgggggaggctggtggccaaggactccgaggcttggatgcagggcagcaaaatgggagttcaggaaatttcccagtgagtgaattcgtaagagcagaaggatctttgagcaggagaagctggaggctggaggctgaaatggactgctttataaaaaaccattttctaactaataatgtatttttaagtacaaagtaatacatgctcattgaagctggagaaatagtagatgatgtataaagggagagttcttatctccccccaccatgagggagcactgctagcagcctcgggtgcatcattcctggctgaaaagggatgcctgcgagggacagagagggaccaaatgatgccagacccgagtcttgtacaacaaagagctgcacaaagctgggagctaggcaaggtggtgtgaaagcaagtttttagcaagattaacctggcagtggcctacagggagctgtctgtgaggctcagagagtgaaggaaagcaggaggctgagggcctggagcaggaaggtggtcattcccgaattgctgatggggtttccctgggaaggagggggcccaagatggcctagagccccaggcctggacgtggaagtaggaggcctgctgaggaaaccggtctgggaagagcatctgtgagcttgactagagcatgctgaggctgagatgatgttctggggttcaggttgcaatatcctccaggcagcttgtccttcctccagcatggaacgttctggtgcccccagcggcctgatgcttttttgtgcctctccgcctctgctttctgaagcacggcttggttttgtcagctgctgggccaagactagcttttggagcacgttctctgagtcccagtgcctctcctgagcccctccccagcatctttgcaggagaggttcttcctccacaaagagaatctctgagctgcacggctgggttggttcttcccctgccacaggtgccttttcatgtagggaacccgtcagccgtctccacgccgctctccatgaaagctgctcctggctgtcaccgcacaatctgttcaacatctccatcccctgttgctattatggacttaaaagctgatgggcgttgtgctgttttgcttgccaaaatggcgaagagactttgttcttcatgcttcaaatattttaatactgtctttgaaacacacctcacacaggcgttttctaatggcctcggacttttcggggagcatttcatattttagctcgtctttctttgggcttttgctttttaagcctcccatgcatagcatttgtccgcattttaataaatgcacatctagggagacagtacctgtcagaggtgtttatgaaggggggaccatggctgtgttgggggcccagagggggctgaggtctgcttctgcgttcacttcctgttagcttcctgccctcaccaagacgagatgggggtcagagagcccagggtggctcccacatccttggttggtcctcaccttctggaatcctctggcccaggctgtcccacaggatggtgtaacttcctgcgtgggagtgcctgtggtgaccgcacggtgcggaatacagcgtggctcccatagcttgagctccaggaggtcaggccagcttccatctggagaggggcccctgctccacccactgcctgccagctatctccagcctgttgcaggggtttgccaccattaggattggtctcccacccaagatcgagttccccaagcttctggatatatccagtcaccatttccaacctcctgccccttctctggagggaatggcttctccagcacataggcccacatctcccggtgagcatgtgtctccccttgggtccaggtcaaagtctggcctcggtgggccacctttggtgtcttgacctgaggctctggaggccacagtgccctggatgtaagcagtctacggcctcaaagcctgttgtgggatcatttgggctgcatccattagctgggggtttcatgtatttctaaatgtctcagctctttagttcttaactttttaagacaaaaacttggtgcattttaatcctgagcttgtagacctttatggtttctctaaagacatatacaacagagaaagtcttcccaaagggaaggatatcaaaatgtatttatactgtccactctgtggtgttttgttttaggtagaaagtatccatctacttcgtactctttcttccccctgttctatgaagtctttgtctggcctaagcctctttctttctcaggcgtcctcagtggtttatccctgtcactcctgtggcctctgtcttctcttccagggttgccaccacgaacaggtctctctcacaatgttcttttcaaattgtgtttgtcttagatgtgtttcatgcctgaatagagtcacattcatctgggggccctcgcagtcccctgcaggagtacagtctgttctacaaatgtatttaccagcttaagcttggaattctacagtgccactaaaaattatgttccttttgtcactgtcagagtttttaactagaatcctgcagaaaacactttatataacctttgcataacgagttattatctatgcttctctcttagtgcccagatgagctctgactagaccaagagaagctttttcgtagccctggctgtgcccgtctctgagtctgggctccagccggaggggtgagtggctcagagcaggagtgggttccgaagcctcaccccaagcagtttaactgcatggaggctgaaattctttgttgtctgggctttcaaaactgtgttatttctgttcatgtgacgacagtaatttaagggcgctttaatatagaggaggaaatgtcattccttccaccaaactaatctcagtaactcactgagctgaacactaagatacaggtcggagtctccaaaaacgtgaaagtaattacccaaagcattgaacaacaatgagaatggtttaaaaaacaagaactgcagtatggacctatgcctgtttcatttcagttccttcccatactctttattttccaaaaattttaagtgaacttctatcattttttatggtataaataatgtacatacacaaacatatatatacacaaatacatatacacacaaaatatacataaaatttaccattttttacccctttaaggtggaaaaaaatctggttgggagatggatatctggttctcaggggtggatccaggttttgttgtgtaatttcggagctcttgttaagaaaaataatacaaaattgaaagagcctctgctgggacccggggagggcccgatgtgatgggagccaagagctccaggtcgctctgttcatctttcttctggggttggcatgagcttccttcccagagggcactgggcagtgctgtttgcagctcatggagccctagccctttgctactgctccaccccatgggcatcaggccccccaacactgaggagttcagcatgagccatgtctgggacagctcattctccaggctctagcctcaaggaggaatcccagtggctttaaccccagctctctgacagccctcactcttgtgtgcctgggcacacgcatgtggacacatacacacagatctgctcttctcatgcaaaacacatgaccttccactgcaggttccacgcagggcctcctaacctgcccctcccctgcctgctccagaccaaccactcatggtaggtctttcttttttcttactaaacttggtgttttagagcagtttggagcttacagaactgtttcaaagatggacccgccacccagcttcccctgtgacactagtatggtgcctttgtccattcattgagcccacagtgacaccttattgttcactgcagtcactgcccccttccgagctccgcagtctctccctgatgacgtctttcccgctctgttgcaggatcccgtccaggatctgttttgtagaacgtcactcaatcgggatttgtctgatgttcttctcttagctagaccaggattatggggctttgggaagaagaccagggaggtaaagcgccattctcatcacatcacatcacatcaagggtgaaccctgtcaacgtgactcatcactgctgatgcttgctagaccttccagacacggggaatttaacctgatctgtgcctagggctagactctcagcagcacctgtcttgagtgtgcagtgccaccctaaggaatgcagcctgcttatactcagtgtctagagagacagtctgttgtggtggaggggagcctctgattagcgtgaagcctccccacttagctccatgttgggggccctcgcgggcattgctccaagacaagctcatcttctccttcatctctgtgaccaagcccttaactttgcagctttaaatcctaggcaacaatgagatgtggagtttgcacaaggagcattaatggagagtggagagaccctgagccttcactccatccatttctcatgtggaaatgaagatcattttatccccctcaaggttactgtgaaagttgaacgtggacacatacagccatcagcagtagctccaagagtgggtgcttttgttccacaaacacttattgagctcctactgtgtgtcaggcactcttctagttgctgaggaccaaacagggaataaaatagatcccaagggagctcagccagtggataactcttttcatggatcaccatgattattgtgagctaatacttatatttcaggagattcaacatgcagactgttgtagcaaaaacagtagtagaattcaaattagaaaaataataaatttgcacctaatttttccacttaactgtaacctgggggaactatccttattttaatgaaagcatgctcattctcattcatataaaaatgcaaagtaaagcatcaaccaaattacatttttcacccaccaatagacaattacaacagttataaaatgctccatgctggcaatgctatgacaaaaatagacactttctaagaactttttattattagaagtactaaatacacacaaaaatatagctccaacaaccagtaacattttaaccatatttatttcatctgttcctcactttccttttgctagagtgttttaaaggaaattccagaaattatgtcaattcatccctaagtgatcagtaagcagttcaaaaagttgattacacctaacaaaattaatagtagtcattaatatcacctgctattcagtctatatttaattttccctaagtgtctaaaaagaaaggtctttttacacttgcatcaggatccaaacatggtccatccatcgtactggttgttttgtgtctcactgtgtcttcatccacaaaacccccttctacctccccgcttcctgcttgggcagagtccatgacagttgtcctatagaaggccccaagtcctagattaggattctggtaattctggtgtttaattggttcctgcacctttttttttttttttttttttttttgagacggagtcttgctgtgtcaccaggctgtagtgcagtggcttcatcttggctcactgcaacctccatctcctgggttcaagcgattctcctgcctcagcctcccaagtagctgggaatacaggtgcatgacaccacgcctggctaattttttgtatttttagtagagacagggttttaccatgttggccaggatggtcttgatctcttgacgtcgtgatccacctgcctcggcctcccaaagtgctgggattactgcaccttctttattgcctggagactggatttgagctgccttccgtttccgggtagtttcttttcttatgtgagtgtgtgtgtgtgtgtgtgtgtgtgtgtgtgtgtgtgtgtgtgttaatacttcttgggtattgcaggtacttcctgctgcatcacccaaggaggcacatgacaccagctgccccgcttctggtgatgttgagatggagccactctaggtagccgccacctgtgaaattcagcagaagttatttaaacttccctgagtcttggtttcctggagtgaaaaagaggcgcagtaagacctcctccccaagcgggtttctgtggctacagacccgaaagcacttccaggcggcaaactgccacagaaatattatgtattaataatatgatgatgcttttggcaattaaggaaaatctccctgctgggcttggtggttcactcctgtaatctcaacactttgggaggccaaggcagacagattgcttgagtccaggtgttcaagacaagcctgagccacgtggcgaaatcccgtctctacaaaaaatacaaaaattagccgggcacggtggcacacacctgtggtcccagcctgggggatggaatgtattgtgggaggtaggggtggaaaagaacatgactaaggcaggaggatcgcttgaacccaggagcggaggttgcagtgagccgagattgcgccactgcactccagcctggatgacaaagcgggaccctgtctcaaaaaagaaaagaaaaaaataccttctttcaaaaaacatgttcctccttcagacacctttaattgagaaactgataatgctcttttttattggaaaaagcttccagtacattttcaaagattggaaaccaccagctttttcaaccaacagctaaagcggggttgtgattcattcctcgtgattctcggccttaccactaagaaaacgaaagtgtagtgatgccctctgtagaacggagcctggctggggaagtgtaaaatccctcagtcttctagatctgagagtccctgaaggggaggaaaaaaggtattaaacgtttatgggatggtttcctttatcaaaagattcttctacctcccagcctccaagacaagcatcctgtggccctcttctgtgaggaccggctgggggcggacccttttaaagggatgttgcttattgattgtcaggaacagacttgctatttaaattttaacagttctcagcaagcttgcaattccagagcttgagaatgagcaaatccttcccaaaacaatttttttttgtatgaatcagggtgcccagagatggatcagttcatttgtattagttttcactttaatctctcttccagccagaccttttattttctagtgaaagaggaaaaagaataaagaaagaattcctatagctgcagcaggactgggcaggccccgagatgcagaggtaattaataggccctgttgtcaaatcaaaccaggcagcagactctgaaccctgaggctggggttctggactttcaggagctgtttacactcggagtgaacaaacagccaggatcaggcagggccaggctggcgggatggggccgagggcgggaaagcggcgtctccaggcttgctctgcctctcccgcagtctgattaatcgcctcagtcacctggtttcaacagttgtcctcttgactgtctctttctgaaacgatgtttgttcactgtgcctgacggagcaggtgaatggctgactgctagacactgtgatgtctgaaggaagaaagggatggacgaagagctttactgagtccagtatcagtcaagcttcctgagggaaaagatggcgttcctgaatgagagcaatcaaggaggaagttttagaaggggaatgtttgcagaggtgcgggtggaggggaaccactgttaccgggggctggtagcctcagagcgggtttcactctaaggttcaagagcccgaggcagttgcagaaccccagaaggagagattatgtagggtggctgcttggaaaagagggggacccaggtagccccaggcagcctcccagtgaggaagaaagagccttacatttgctcccctcatctacaggaagcctcggggcaggagtcccgaggacagagctggatagggagggcggagcttggatctagggagagcaagctgtccagcaccctgggccaagcttacagctagatgctttcaatgtatgtgatttcatactcggggagtcttgggggttatatattatcaccccatcttttcattatttcctttaatttgttttttgagacagagtcttgctctgtcgcccaggctggagtccagtggcgcggtctcgactccctacaacctccgcctcccgggtttcagcaattctctgtctcagcctcctgagtagctgcgattacaggcacctgccaccacgcccggctaatttttttgtatttttagtagaggcggggtttcaccgtcttggccaggctggtcttgaactcctgacctcgtgatccacctgcctcagcctccaaaagtgcagggattacaggcattgttttaatctttaatggtagtgaaacacacataaaaaatccatcatgttcaccatttgtaagtgcacggctcagtggcattaaacacattcacactgttctgccaccgtcaccaccatccttctctagagctcttttcatgttgcaaaacttctgcaccactaaacagtcgctccccgttgccctttcccctgctcctcctactttctgtctctgtgaatttgttctagatgtctcatgcaagtggaatcatacagtatttgtctttttgtgacttatttcatgtagtatactgtcctcaaggttcatccatgttccgccatgtgtcctaatttccttcctttaagaagctgaatagtagacattgtatggacagatcgtatttgtttacccattcatccatcggtgggcagttgggtttgttaggaataacgctcaaaatcctaaggaaagtgaacacacgaacaaaagattcttagcaaagcaattttacttctgcgcagaggggtgcctccttggccagtcgccatgacagcacacctgaacaaaggggcacgagagcctttattcctgacgcaagtcctgcccctgtaccctttccccattggccggggtcgggtcatacaatctaaactaatcccggttggctgaacctttgattttttttagataaggtgggcacgtaaaagaaagcgaagaggaaaggggaaggggtgttctgtaatgaactagaaagttagtcctctttccaaataaaggaaggaatgtgagctgctactgataatgcctggtactgtggcatgcctgggcatctaacaaaggcaaaaaggaaaaaaagggaaagggcagcagggggaagggtactataaattaaagaataaaagattgattgggttctttgaagagaaacctcatcatatccctcaggttgcttctaccttttggctactgtgaataaagctgctttgaacccaggtatgcacatatctcttcgaacccctcctttctgttcctttgagtgtatactgagaagcagaattgctggattctatggtaattctgtcttaattttttgaagagccaccatactgttgtctgtagcggctataccattttatattcagaacaaccgcgaaatggggcggaatttcttcacatccttcccaacacctgttattttctgtttgtgtgtatgtgttttcttttcataatagccaccctagtgggtattagatgcaatatcattgtggttctgttttgtccactgttttcacggaagttcaaacaaaactgaacacccttaagtgggagagctcgtagtcagctgtggtctccatgcttctttcttctacataccagttctcttcagaatgagaacggtatttccatggaagctggacttggcacgaaggggccctgccttctaccaaccgagtctggttgccctgatactgggaatggcctttcgtcttctgcattgacaaatggctgttttctgtaagggagactgcttagcaaaccagatcaccatgagctgcatgatacaagtggaagggttttaggctcccagagtaaaaagggaagttgctgtgagttcttctgtaggtaactgggaatgcgcacattttgtttttaaaggagacacacagagagggggatcctcatcagctgcccattatccatgtcactggaaatcaaaagccaagaacgctgaaatgcccagctggtggcgaagactgcgttcccagaaagccatttttggaagcagcttgatttgaaataattaaaaagatcccatcttcatcgccaactggcttcatgcttcagagcagcttaactttgtgttaaggaatccagtgagcagattctgaattagtgatagacacctctgtgtgaggcaacagaagtttcctttgagagtctcattttcattttggagcaatttatggccactgcttggtgattggtaaggagctggagtgcatttccaatgagctcgcaggcgcagacttacgaatccccgcggttggggctgcaggtttttggagaagcggctgggattttatgtgtggatgctgacacgcagctggtactgtctgcaggctctgcctagcccaacactatggtggaaagcatgtgccacctctttctgaccatctctaatgtgggtgaaagggaccttagcgccacttcaggtcagcgagacagctcgatttccagaagaatttcccccacccaggttttacttcgctagtaacttgaaaattcagttcaggcatcatcacaattcagaatgggaaccgacagcggatgctggaagtcactgccaagactttgttcattccagggcatcagtctacaaaatgactgggctgaaaagcctgtttaaactctgcaaaaaatccacgcaagggtgtaggatctccagcagaaccttcggaagccttgccggcaagagtgcatttggctggcagagtccctcttgcacacctgctggaaagctgggtgggaagatattctaagctcgctgtgaatttcattacgcctctctccagccaaagccactcaagggtgtggtggtgtaatgggcctgccacgcagatgggctgcgaaatacacagcccatctgtctttatcatgctcatttcctcttttattaaaatgttaatgaatatagtttttatttatcattcagtgacatgtgcagcatccttttctgggagacaaatctgcaatctgcctaaccatgtgagccgacggagaactttctccccttacatactgaacacaggaattagggacgttttggttccttttaaaccgccgtatgcaggttgcacaaaaaaatccttttgctcattgatggcggcaccggggaagttgcctttctggcttgtaagttactagccacatggccagagcctcagtttccacacctgctaaatgggataagctttccttctcctagagctgtcctgctaagcaaatgagatgttccctgagaaagcctttgcattcacctcttattattcagacatgataagcctgtgggcttgaattcgttttcttcattctttcagactctccatggaaggtgcatctgtcaaacgttggccctgagatgacaggcgtcaccgtgagtggcctgactccggctcgtacctatcaattccgggtgtgcgcggtgaatgaagtgggcaggggccagtacagcgccgagacaagcaggtgcgtgaatcccgccccaggtgggggtgtggaacagccgggggcctgaatgccaaagagaagcatcacattatgtggtggaattgatcacagcaacccgctggcttccctcagggagacgggacaaaccgtgagcagaaaagcctgtcgcaaagagggaaagacaggcccacgcagacttagctgggccttccttcattgctttgaggcaggttccttggatttttcctgtggcgatctggctgtgcctacataaatcgctcctgacagcacagccctctgtgtacaggaaattcagagctcacatgttttccgtgttctttgtccaccccactgccgggtggacgctgatgccacagtcttagcaagtcaacacctagcatgctgttaagggaagctgtctctgcagaggcgtcgcattcctgagcggtcttcacgctctcccatccctgcgagggccacctctgaaaaatctcattcggaggtgacatgggaaaatggcttcatcacatttcagcacaccttccccaaccaacctgagctttcagtgggcttgacttgtagaacagctgagctgtaaatgcctttctttttttttcttcaaaatgtgggagtttgatatgagaaatattgaaagagccggagaaaacagtttgggaggagtctgagacggcaggccgacgagcggacgcattcaggcttgcagtctttctaaagggctgaggtgctggggttattcacacagaacaaagtcacctccacctttcctcgttgcttggttaactgattttctattatgttgatttgtggtaactgtttctcacgtcctttcagtttcattggctgtgtgttttgcttttcctgaaacccgatttttgtgaatagtcaggctcaagattcagcaagatagatgaaatgcaaatgggcccccgctgtttctggtactcatctctcttgttcctacccgtcttttatttataggttgatgctacctgaagaaccacccagtgctcccccgaaaaatatagtggccagtgggcggactaatcagtccattatggtccagtggcagccacccccagaaacagagcacaacggggtgttgcgtggatacatcctcaggcaagtgccctgtgattggccatctttaggccgccattagagttgagcgtcgatttcacagagggttgcaaactctaatgtctgtaagagccaaacaggaaccaaaggagtcaggccaggtgtgagatgttagggagtggtggagactgtggcaaactggagtgcacaggccaacgtgggcagccgtgcagagacattctgtgcatatctgaccataaatgacacacacaaaactggtgtcagggtagcattttggcaggagaatggagggggtattaggggttggaagcaaggtatattgttcaatgtgaagctttttttttttttttttttttttttttttttttttttttttttgatggagtttctctcttgttgcccaggctggagtgcagtggcacaatcttggctcaatgcaacttccgctgcctgggttcaagcaattctcctgcctcagcctcccgagtagctgggattacaggcatgtgccaccacacctggctaatttttgcatttttggtagagacagggtttcaccatggtgaccaagctggtctcaaactcctgacctcaggtgacctgtcctcctcagcctcccaatcctcagctgggattacaggcgtgaggcactgcacctggcctcattgtaggtcttttgattccatttaagttttcaaccaagggcatgtgttgttcaatacagtaattttaaattaagaataattaatttcatgtaattattagccagttgtcaccatgctggtatgttgcttgctatttccagaaatccaaagatctagctttgtacctgaaacctcccaacttttagatgttggaaatgaaatcaatatatttggaaacaaagggcagggctaacacacacttctgcaggccagatgtggctgaagggtagccagtgtgctgtctttgctttataaaggacagttaggcttctagaattattgggaacactgtatctgaacttgtctgtgtttgagagaagaaacctcctttgccaaaactgctaattttaaaattgcactgaacgcgatcattgcagtagcctgttgacacaagtaaaagcaaaagtaaagcagaattgcataataattattaaatctcttctaatagattgcaccactgtggacatatttgttcattttaccagtgatattgggacaagaacagtgggtatccgcttattcccttcctgggctcgttccaagtgtgtgatcagtaaacagtggctaacaaaggtcttcagcagacagatgtaatttcttagataaatgtgagaaattgggaaatgttgcatcttcagcttcattatccttgtgtatgaagggcaacgccttccctgtatatatgtgtatagccatccattcatcatttaatatgtgtttttctatgtgcctggactatttgcctgtcaaaaccaatttgccgctgtttacaagtttttcctccagcgtcgggattctcttctaaatgtaagccagaccgtgacccacctgaagtggtttaaatgggccatccccaggggtacacaaatagctccaatcaatagcaaggccccttttgtctcgaggctccaactgtccttcctcatttcaaagaagggggaagaggagcttgcagttctgtcccctcggggtgggggccgcaggctctggttcctgttgatcccctgggacagttcctaattgcctgaccacctccgctccagaaaacagccccgtgtccccgccgcctgcggccgagggctcctgtggcactgctgctcttgcccctgccttagccattacctctcattctgcacccatccactaatgagaataattggctgccctctgtacccagcagcacaggcctgtcatccctctgcctctgcctttcttcagcatgtgcaggaagagtttccttaggctgaagccgtcaagtaaggactttaaaagtcatcccacagaaccaggcccggggcacagagtttaataataaaacctctctgatgttacgaggccacttcggggactgcacatttctctgttttgtgggattactactgttaaaaggattttctgtgatggggtcagtagagttgggtgctggagatgagggcatcttctgtatttgcaggagcttaaatccagaaagctccaagatgagggtgcagtaccctaggcctgtgaatatcaaagttttcagaaatgaaagagccatgccaaagtgaatttgcttaaaaacatttccgcataatcctctggtctgcacatcagctctctgtttgcgagtgtgtatcctccagggcacagtctctgtgtcagatccgaggcacaatgcaaggaaagcaaagagaaataaatcacttccgtggctccagccataagaagtagttaggacgcgtgtgcagtaataaaatatttataataatagggagggtgtttctttgagaggagcataggggttatgtcctttataaacgttctcctgtttatttttgtataaaaaatcatcttgttctggctgagatggtctcctgggcaacatatcctaccagcaagaggaggctgccctgcacttccgttattgactgtgaccttcttagacatcctgtgactatcacaaaagcacccggagccactggtcagaatgggccaacgtgactgttccggaggggagcgcaggctctttggaagatgtaaattctgcagtttgttattcacagtgctgttaagagtggccccagagaagttgggtggctcatgcaggtgtagttccttataactcatagttatctctaccatacttctcggtagaagagcagtgtttaaaaatgtatatatatttagggagtgctttacaccttcacatctcttttacattcagtgtctcctttgactcttgcaacaagaatggaaatgctactgtcgtacccaccttaaagaggtggaaaccaaggctcagagaagtttggaattttcccaacaccacccagcttctgagtggccgttgagcaaagtcttccgatgctggttcctcagctcttccctggaatgtgcattgtgtagcgttgggtccacatgaggaatccttcttaaacggcatcctcattctgtcatagtgattacagatggtgcttggtgccagcatgcccaggctactcaggtgcatggtgtgggcacagagccagtttctaccttttcccaaatggctgtctcagtcccatttattttaagcgttcatcttttgtagatggtgaatgtaagtggaaatacctgtcacacaggtgaatccatgccaagcctttctcccagtggcccaccgccttgaggaccatcatgctacgtcggtgatctgaacaccacctgagaattgcacgtgtacttgcttggtgcaggtcgttcagtaaaggagtcagtgatggacacactaggaagccaaaacatggtttgataacttgactttcatttttgcccatcacggaataacgctgtcccttccctgagtctcccaccaggcaagcccagaggccacttgctcctttcaggcaagagacagaaggaggcccggtaccttcttgctactcaagggccatctgcttatcatcatttgttttctatcaaacaggccccaccaagtgtacatggtcggcggcaagagggaacgggagaatgctctcggaaactcctgatttttgtgaagaaccttgtgtgaccatttctcgatttcctcacttcattttcaagccctccttctcttgggaaagttgttttacattttagggcctgaatttctgggtttcttctctgcttcggtgtcagcagccttactgatgttccggtccacgcgtgtctgtctcagctccttccccttcgtgctcaggtgccctgcccgcgtgggaccacacaggtaatggacatggaatctgcagaaccacagagctcagagatcagcgtcctggaggagcctgaagatttccacatgccgtgaaaagccagcggatttgctgccactcaagtgtgggactgtgaggcaggagccacttctgggatagaaattagaggcttttggaagctgcaggatgacagggcagtcactcctactgggcatgcccctggctttacccagaggggctgatccaggaaagctcaataaattacctgagtcagttcagtgcattaacttctatagactgaatcatggagaaacatatgctaatcaaaataatacaatgcaaatcttctcacagtacacacagcaatttcctaatttatacaccctaagtcctgagttgtgtacattatctttttcataaacactactttaaatttccacctttagtatgctaagaacatagtacccaagcactcacagaggtcttctacaaagcaatttgtcatagttagtactggactagtattttagaaatttcaacaccttttcaaagccgctgattcttgttctgggatacacttggacaaacctgcaattcctaaatggagctctgtccctggacaccacaaggccgtgtgctgcttgcttctggaagtctccccacgtttcagactcacaagaggaaagtgtttctcaaactgatttacagcaactccccgatggaaatcatgtctggaatttttcgtcctaagtcactgtagtccctagacgagttacatgtaaaaagctgtaattttttcttaaccgttatgtagttgaaatgtcagttccattttgccttgagcttataatcactgtgagattagagcacacttttcaaaatcatcgagttgggaaatagtattgtttagggctgacctctcagctctgctcttgattatttacttccatttccccctaaccctgcggaataactgcgggtaaacaccgttcctgggtccagttatttccttatcgtgatgggcttccttcgtggcgcaggtaccgcctggctggccttcccggagagtaccagcagcggaacatcaccagcccggaggtgaactactgcctggtgacagacctgatcatctggacacagtatgagatacaggtggcggcgtacaacggggccggtctgggcgtcttcagcagggcagtgaccgagtacaccttgcagggaggtaagcttgtctccaaaaccacgaggtggcgggatctttgccggggaatgggatttgcaaggtttgactggagtacgttagaaagaaaaacagagaatccagtcccctagggagcgtttacaagaaaattcatcacgtatttaatgggatctctccagctattcctcaatgaaaacagaaccgtagacaggagacaaataatattccaactgctttttcagtgactaaggaagtttctgtacacgccttttgacgggtgcatctagtcttgaaaagtctgtggaactggatttttctaaatggaatgattgtaggttttcacaggaaagctggctgtggagttctgtgtgatactgtgagtgtttttcaaagagcacgatgattattcacagttttatttttaacgacgtaacgtgattactggtaatcgaatttgcaacgtggtactttttttggttgtgcttttcagttatacaagcaaacaatctactaggtcaataaaaactgcccccgacccctggaaaaattgaccagacataaacgtcatgaagccagtggttcttaaatatccgtggtgagatccgggtgcggcgtggcaggctttccacagcatctggttcctccgctgttttctgaaagattcagatctcagccccaggaggagccagcattgggagatctcctccacatctgcatttcactgttactgctcttagcaggaataaacagaccctctcccaacacagcctcatttgtcctacagcagcccaaatccttgcccagggaagtaatttttctactgagtctaaaatcctttttcactctgcgatttatgccctcgcctgattcacaggtgtgattttatttgcttaggcatttttattgctaccagaccttgacctttttcagatgacaaggtttctgactgcccaattctctccccaaatcatgcctgagacctaatgttccttgatattacatgcttttattatcatcccgtattgactggctgtctgttgtcatctgtaagtccataaatcctcctttataaattaagtgcagtcagttctgcctgcacagcgactagaagaaatatttaaaatgcaggacagccaggaaggacctgtccatatgcaagtaattcttgattactcatttgaaaaggaaaatggctgaaaacctggacagttaacatttgctttaactggtctatttaataaattaacaataaacttagaaacacttaaaaagactcatattgctattagtaatcccttattactattaactgtgactgtttcattttatttccggtgcatttgagttctgcatggggcagagggaagtggatctccacctaattgagaagggctttgaggctttggactctggcttttattcagttggcagtggggaaccatgaaaggcttaagatctgtgagtgacatgagcaaaatgctgcattaggggcggaatctgtgcgtgggtgtgcagggaatgtaggaggcggggagcagagaatggcagcagggactctagagacaaaaaaaatgaattgatgagtgtcctctagctccaaaggctggcaatgagaagagatagggatgtaagtttaggtgggacgccattgttttcaaaacagctctcatggattccagggttgtgccttccagcaaccctgaaaacgaatgcagtttcggccccacaagcacctcccagtgccttctgtacaacagggctgggtataaaaacaggaacaggcccagtgcctcctgtacagtgggactgggtataaaaacaggaacagagcccagacccttcctcaaagtgcagacagtttataggatacagcagggcaagtttcattttcagacacctgttcataggaagctgaacattagctaactggaatttagttggtcagaaatcacacaggccacaaaggcagaaccagcactgacatccaggcttccaagacaagactgctgttctctgagtgacatcagctgcctctgacgtcagtaggacttgagatttcagaggagatttggcgagggactgtgcttagctagtgggctggggtgcagggttcccctaagatagtggcacagtgggtggggtcccgcctccatgtccaagtagtcttctggatggggaaattactaaattatgcattgctctgggaatgaactttttcccatatgtgatgagaacctgacttcgattggtccaaatctggttcatcatctatacttaaaaaaaaaaaaatgctcttcatgagtgaacgttagtggataatgctgcacgtgcagtttcccatctgcagctcggcttctgtagcagcaccatccttccctcacttgggtgtttgacattgggggttggtatacagagcccctcatgggtctcggagggcccagcagacacagtcgtaattcctgtcttcgtgtcttcttcatgtcttctgcctcggcactcctgggagcacccttatacagatgtggatggccctcccttgttcccttttaagcctggtgtggaaacacaggtggccccgtcctccctttgagggactcagccctccctctctggatgtctcggactcccgtgtgctcagtgggatggtaaatgcctctggggaatctccctggagcttgctgggattgggaaggtcatgtcatgcttttcttccagaccctgactccaaccctaaacctattcctgggccacgaggatgaacatctcaggcttgtgacagtctcggagacgccgggcaccacccacctgacccttctttgttcgagggacatgcttgagtcccaggataaattgggggctgataacagttactggccagagtgttaggacactatcccttggacgtggctggggtcaggcacgtggcaggcagcaggaagggtggtccatggcctgggggacatggctggcttggctggctgcacagccttgatgcctcagtgtagtcaaatgcacttatccctctgtgctattcaaggacctcccagccagccacgctgccgctgaacagaatgaagcgagcgtatgaattctgtcctgaatccacgttcccctctgtgacagtacattgctaggagatgacatcagaccaccagtctagaaagagctggggaggtgaagggaagacgggggcaatgcttgcctggctctggaggggaagatgcaatgaatgggacagaaagggatctgcctagaaggtggcacatgaggaagcagagtgacaagagggactgtgaatgcatcagggggacagtggtgggggcgcagtgagcgtgacgtttcacacacacgtgtatattcacacatctttctggatatgtgacccccagaaagagcccttcctgggagtccatccaggcctcactccatatttactactaatgtgccttcaagaagcacctgtgcccgttctgagcctgcagttttcatttgtgaaactgtggcatttacacctgtcctgactcaaagggcactgtgaagaggagatgagatactacgtgtgaaaaggctttcaaaacaaggagacatcacacacatgccagcactgtggctttgtctgtattcgtttttccactgtgatgaagagtgtctactagggtatttgaatgcttccataggggccattacactggaagagatctgggggtcatctccctactgacagtaacatcaaacagagacactcaagaattgatgtgagcacctgcagtttgtgcagagttgtgggaagggccctgaccccgagggtagggaagatatctggtgtgtcatcatccttggggacctgcagtctggccctggaggtgagactgtcattcatgaaataagagcaggaagtagaaaagaaatcagcctcactcatgcacggtcacccctcatctatccacagatcggggtactgggcgtgctttgaagagtcctcagtcagcacccagaggaacgggctatggacacgagggttgtgatccacgtggcggggacacctcagagtttgtggctatctgtgttgcttaggaatagtgtctggctgctagaaacagacccacagtgacaggagcttaaacaagatagagctgtgtttttacttttctcacatcagggggttgggcagtaggtggggcagtcatagcagcagctccgaggtcatcagagattcagggttctttgtctttttggctgccactttagcacgtgcctcaggtcacaagcctgctgctgcagtgccagccattgcgtccccactctagaaggcaacaaggagaaagcctcagggttgtgccttgggaacgagtatgcccacctttaaggaactttcttagaagttccatttgctgctgactctgcttacaattcctggaattctctccttgtggcagaggctggcaacgtggccttccagctgggcacatatctgtcccttgttaaggaaggaaggggaagctcacagcttctgcctcactttctaagtgagatgaaatctgacaatgggctcctggcttgcctcacacagaatgaaaactgcaaaagcacaggtccttcaggccatgacttcccacccatcccctgagggctcctcagcctcaggcccccagctccatggggctgtttgggcattaagtgctaaatgcttatttgctgctgggagccccacttaggggcttgaagtacccccagctattagcactgattgtcaaggcagcctaggggcttgagcaggtccttgaagctgaaaagggagtaattaaaacgcctgtaaactgaaagggaaagcataactcataaaattaattatttgtcggcataatttgggaaattattggaatgtctacaaagagaattcgacagcatgtcagagagcatgcagaaggcaggaaatgcccagccaggagaagaaggaagccctaggccagccagcctcatttctcctcctcccttcagtgagtggcagcttgaggtatccggggaaatgagatgtaattcatcttgactttaataaggcccttggattgagctcctcctgagaaagtatccgaatgcccgggaaagatggtgcagcgtgcgctaccattaggcgggtgtggaacttgctaggctgccgtctcaaagagaactcagcagtgacacagcatatgcctgggctgagggagggaagggcatgcaggctgccctggttggcacaagcagcaggcagggagcaatggagaagctgtctgctgcagggggaggtagcagctcattcttctagagcatacatttttggtctcaaatgtgtttccttccaggcaactccttaaggaagatcagcagtatgtagtgagcacagtgcgatgttgaccccaccactcactggccacactcctcgtttttcttttctttctttctttctttttttttttttttgagacagagtcttgctctgtctcccaggctggagtgcagtggcgcgatctcggctcactgcaagctccacctcctgggttcacgccgttctcctgcctcagcctcccaagtagctgggaccacaggcgcccgccaacatgccccgctaattttttttgtattttattagagacggggtttcgccgtgttacccaggatggtctcgatctcctgacctcgtgatccgcctgcctcggcctcccaaagtgctgggattacaggtgtgagccaacacgcccggcccttgtttttcttttcaatcccatttatggctcagatatatttacaatgcatggtttgtccactccagttcttcgcaagctctcggcatgggctagcaccttggacacatggggattacttaatataaactttctaactttcctgacttttcttatcccccttcatccaccatcccccattatcttgtcggccaatcccatttaatagattttattaacggtgactccatgaccttttcagctcaaggcattttaaaatgggacatattaacttacaaattgagcagcaaagctctaatacagtttcagccaagtgaactttctgaggggtgagaggaaaggttggtgctctcacagaagctgtggcctgaaactccaacagactcagttccgcatatcaaatttccatgatgattacccacgatgaaatggaaaataactgaaatttactcgagaattttaaatttaaataaccgaaatggactcagaaatcaatacgcttttggtgtcgagtggaaaaaattccgcggagtgtaagttgtgtataaccgagtgcccagtataattagaaacatttttcttactgccagtgtttacttcagcaactttctaatagtgtagcttgggagggagagtactatagtcatttgaagcaatcagtagttcatatcgatgctgactcgctgtttggctcacaaattcagtttttgttagaaattgttcaaataatgatgaaagacacaggaagaaagaatgtggctgtgaagttttcaggtgaacctgagtgtggaacactggacactgccaggatataaaatgtaatcgattacagttttgtcctaaaacaagcctgtatggattagcaaactccttctatacattttttgaattcatccattaagacgcagatgttggtttttctagaaggggtccagagacaaattatgctataaatcatcattctgagcacaccaagattttcctttttttctggttttatttctttatcatttttcttcttgtaacaggtatatttgtgctgtaatgatttattctggtttcagaacattaccttataatgaaagagaaatatttcatattttaaaagaaatggaaaaaacatttggttatccacatttctaaaacattagtaaaagctcctaaatgttcacttgggctttgaaaggttttctaaagtaaggattataaatgagcactctgtttgcaagccccattcttatctcctcttgggaaattctcaatgtggcattaaatgacattgcacaaaagatttgtttctcaagccctacaagactttctagacctcaggctgtacctgcagaataggataatgttccagattctcccagcgttgcctaaaacactaagtaaaaactgaacaaaatagatatggaatattccattaggggtgggcttcctttggtcttttagaacctacaggaagacaaaggacaggaagctcatgctttaggggaagccactgtgtaccagccttcaccatgctgtgccacgtccttacattcactgtcttactccattcatccctgggggtcacataagataagcatcatatccctattggacagaggcaaagatggaatctcagtgaggtaactcactttcccaaggtgatatagctggacaatgctgagaaatgccggagccgaaacttaagtctgctgggctcccaagcccaggctatcatctgccattactacagtttatgttttttgtttttgtttttgtttttcattctgtgtatatcagccctggtgaaaaatgacttccagattcccacagccgcattatgtggaatagaaaagacatgggcgtgcttctcactctgccgccgtagagggtgggtttgcagtggtttctgagcactttggactgcggtgcacaatgagaactctattttgcattcacacacacacacacacacacacacacacacacaaacagagcatccatggaacaatagtgactctcccagtgtatgtgtactttggtattttctgttctattccattctgtttcattctttaaaacaatgctgctgtgaccacggaattgatttccctatccacgagtgtatttgtgacctacagtttgaaaaatcctgaattccagcaatacagcaacactgtttggtttgactgattcttgcctccctttcggaaaaagcttccgccgaacagaggattcatcagggtctcggctatgaagcctgtcttatcctttcaactgtaaagacagacgggtctgagtgagggcgtgagcagggccgccagccgaggcacatagcggaggactggggtggagcagggcaggtagggtttagcatctgtatcggtgcagatcacctctgtgcacacagagaaggggttcctgggacttacccttcacctgccgctagaggacatgtggaaaaataaaccaatctaagttactgtgagcatcaccttattttgtgattcgcaggcctgtctttcctgctagcctaggaaccctgtgagggcaggggctgtgtctgatttgtctttttcatatctgtatccccatatccaagcacaatgcctgacctataagtaaacaaagcataaaatagatgtctgattgaaaacacagggcttattgttcctgtttcaacacccagtgctgcaccactttaatctccatcttcagcaccatagcctgccttctgccctgactcttgctgtctcgaagtctcggaagaaagcagtcctgagccctgtcacatgtgagttaggccttcctgtctttctgccttgtgatgtccaacagcaacccttcctgggtgccgcccacactgagcctggctttgctcaggagcctaaatgcagaatctttcctcctccccctcccctgctggaaatgctgaatccgggactgcagcccagaaggcgcatggggaaattaggtccacgaacgcgtccccagcgttggggaggtatgccactcagcaccctggacacgccaggccgcagcgctggtcttccacagtccccatgctgtatggaaaaggccccttgccccacggctggagaggggagctggtcgtgggaagagtggaagagaaaccacaaacatgcaattttcagatgcggagaatgcagagacagggcatgggaagtgggggtcgggagaggaagaggaagagacaccaagtcggcaggagcccaagcgagtggccagagcttccaccctcggtggccttgggcccatgttttagaagctcagcgtttggcatgggcgaagatatattttaggaatgaaactggtattttgtgaatagaaataacatcttgttcctaactgacttcagagtcagacgactggcttcacgagggcccggtgtgcagacagcctgccagggcctgcgggctctccccacgtgctgtgcccccaccccagcccaaacactggccccaaatgcttctcttcaatgcctggcaagtaaagatttggaaaaaaaaataagttcagaaaggaacacacaaaactttttaagtgttaaagtattttcttctgaaggccatcagaaaagaaacttgagcttatttgtcaaaggtttgttaacctaataatgccgtagaaatgtttaatgcagtgagaaccttcaggtctatcaaaactgcaagcaccataacaacgcgagaactcagccgtggcccataacaatctggaattaacgataacacccggcacacaaacggcaatatgtacacccacccagcggtgtgcggccggtgactctaccaggtaacgaactcaccgctccctggtttcaaaggcgtatacatttaattctatgtggtaacctggagaaatggacacctgtgaatccctgctgtgttctggatagatgcatcagtcccttatagtttaaaccatgtacatttgggatcatgaaaaacggtgtgtgctgttgtgcaggacgtgaagatttgtgcttcttgcatcgtggggtagaagcagctcccccactggctgctcggctcccagcccctggcttgctagaggagatcggagccagcaagtggtccctgaatggtccagtgaaggctgccgagcacccaggagaactgatactgcacctgagggtcatggacgatgaaatttcactgtgtagagaaactgagatttcacggtttatgtgtaacagggaaggtggtgttgctttagtaaatagaactgggcatgttagaatatcggcaagtgcactctaatttcctcctgtgccaaatccagctgattttacagcattctcagtgggctccttagcatgtgtaggtggggtttgcacagtcccgtagggatactaagtaggatgtagaaattgctcattccttactgcagaggcctggatattcacatccacctggcccaggagggcctatgaattgctctcccagcacctcctaatatcagtttattaattttatttgacatgttgcaaatctccaaaacatcctagagctccatgcttagcatgagtttcctcggattaaccatcattttctactatttctccgtttatgtagatggaagagaagatgaatagtaataatcttttctcaggggtgttgcaaataagctttatattaatttcatcacattatatgacttaaatatcaaaaataaaaatgtgtgtctctctcttcagcagcagggaaaatacctgctggacgtagtcacagactctgtgggctttaactggcagcaaacggtcctggtagaggagaggagaagggggagaaggggcttgtgggaacgagagtaggggctttctatcaaccaattaattaggatctagatagaataaaagcaacaagcaggggaagaatggaggaggggagggagagagggaagaaagaaaggagcagagaggaaggtaggcaattaggtaagaaggggaggaggaaggaagggaggagaaaataagtagaaaagcaaattgacagtggtggttctcagagatggtctgtggacccacagaatcaacatctcctaggaacttgttagaaatacaaattctcgggccttactccagacccactgaatcagaaactcttaccatatgtgtttcgacatgccctccaggtgactctaacacccactctaatttaggaaccttctttaggcattgataggtagaagaatgtaataccaaggactaataaccatgagccccaccagctgtcatagcagagggcttgtacccacggaggatcagtccaggctcctggagagaaacaataagcaacagtccccgtgaaccacagcatgtgacatgtgacatcaccacgtgtgcaggcaaatctctcagaagaaacctcaactgtgtctcaggaaactctggtggttgggtgggaggctggagtctccttaaaataaaggtcatgactttgggaaaaaggtggatatgggtgatgacacattgtctacataagaggactgagctgttgggaccaaggtgaaccagtgaaaacacacgtttggaggaggctagaatttcataacactttatgtcccacatttccacctctagctctctggaggacaggctgggaaggtctcattggccacactgacttccagtcaagtatcccttttcttctggttttgatcggctccctgtcaagatgaatgagatttttgttaaacacgggattttgttgtgacttgggatggggttcatctcaaaaaggagaggaagagcccattcagcggaaaacccattggaagatgaggagtggagaggaaatacttggacggagctctgcaacacttgatggggacaggactccaggttcatgtaaaaggaagacgccaagagaagcacaaccctgtaattcctgtaattcccaggaagccatcaccaggggtcacgtcgggtgtgctcaaagtgcggcacattctaccaaccccgtttgcttttccgaggggggtgggggtcactgaattgatagaccttttccgaggtgggtgggggtcactgaattgatagaccttttccgaggggggtgggggtcactgaattgatagacctaaataccatattcatcctgtagcttgattttctttcttttattctttctttttttttttttttgtgaagaagtctcactctgtcatccaggctggagtgcagtggcacaatctcagctcactgcatcatccacttcttgggtaaagcaattcttgtgcctcagcctcctgagtagctgggattatgggcacgtgccaccacacctggctaatttttgtatttttagtggagacaggatttcaccatgttgggcaggctggtcttgaacttttgacctcaagtaatctgcccacctgggcctccgaaagtgctgagattacaggtgttagccactatgccctgccgattttctttcattcactcattcattcattcattcattcattcagtaagcactttgtagataagatgagaaatatggattgggtaataggtcattagatggactcccactcacatcacccaagcagggtggggattgagctatgcccaaagagtgtgatttacttgatcagccaccacttggagggtgacctcaacaaactctagcatgctgggcttctcctgggcagtaccgtctgtgacttggagcaaatggagatggcatccctgtcaaatatgcaggtgtcacagctaagggggtaattcatcgattctgccccagaatcagaaatcaaaaataaattgctttgttagattggtggttggaatcaacacactgaaatgtagaaaggataagccaacatgctgcactcggatacaacaaccactaacgtggcagcaggatggggagacgtgacttgtcaccagttataacacttggggtttacacccagagagagctgtgaccgtaacttaaactctctgtggatgacaggtttccagatcgaggtaaatggcagcaccatacaaccctgtactggctagatgcgcgtcaagcatcggctccgggtgcctggccaccaggggaagcaggaaaattcaggcccctctgaggagcagagccagaggggcagtgcttcatctgtctcatcgtgtgagccacacagagagaaccaaggcatgtgttcctcctatcatagtcaagtccagttagatatctttgtgacattcaaatagtgtgacagctatatatgtgtacgaaaacagcttacgcagaagacagaggggaaccaatgggcagaagttgctcaaagaaagatttcagttcagcataagggaaatcctccttatgatgtacaccctgcacgagttgacgtaaggagcaggaaggttgggtccaagaagttttgctggtggcagttgacaggtcgcaggcttgggtgaggtgacaggactcctgcccagcaagttggcacatgccgtgacctaggagggcccctggggcaccttctcctccagtctgcataactctatctggacatcatcaacgggcttttcatacgcgccttggtgctatgaagcttcacacaagaagcgttcggcaccaacattcaggtgattttaatttcatataacaaaaccatgatgctgaatggagcgtatgtattccagcttgcgtccatgccttggcatgttcccaggttgcactagccttcccgctgtgtttcatctggcaattatcacttatatttaaagctttggcccaggaactgtctcctccgtagggcctcctttaaagaattccatgctgacctgcactgtagcactattacacagaagtgtaaatgtctgcttcccctactacactatgagctccattaaggcagagacatcgaacttagatttgttacataaacacaaagaaaggaccaggtttcataacagtaggcccccatacatacacattcacatacatgcgcaaacagagacaagtatacatatacatgtatacatacacatctgcatctatatatacacatgcacacacatgcatgtggacacgtatatatacatggacacagataagtctatatacacatatttaagtatacatagatatgttcttgtacatgtatatatacacgtacatctgtacatcctcacacatacacatatgcatgcagttatcagataaaatcggcttctgtgtaattgaaaatctaaagccaaaataattatttcagcaaattataatatttataaattgaacttgtatattttgccatattattagtctgtaatcttttatcacagaatttttagggaggaaaggaaaagtttactagccaatggtaatgttactcataacagagaatcaatagattgtatccagagaaagagaggactaaggttctatgtaaacgtctgaattatgtgtgtataaacattagagcaaaagtacaaaaaccttcccgattactaaaacatatcaaaaaagagagaaaacagaccaaataaagacacacacacttacatatgtcaagaagtgtacatgtaattatatgtatgtagagaaatatatgtagatatagcaactatctacatataaatatatgtagatatagcaaatatatgtagctatatgacagaagtgaagtgaaatttattgattatatcaataaatatactggacttaattagctttataaaaataaataacatttccccagcactttgggaggccgaggtgggtggatcacctgaggtcaagagttctagaccagcctggccaacatggtgaaactctgtctctactgaaaatacaaaaattagccgggcatggtggtgcacgcctataatcccagctactcaggaggctgagtcaggagaatcgcttgaacctgagaggcagaggttgcagtgagttgagatagcgccactgcactccagcctgggtgacagagtgagactctgcctcaaaaaaaaaaaaaaaaaagtacatagatagatagatcgatcgatcgatcatgtcctaggccacagaaaacccaaacaggtccaaagaatgcagacaaatgcaccagataagaaagttgcggattagttttatcttaagagtgttgatgggaaaagctaaaatggtaaaaattatcaaaatccaacagtacatttaaaacagtagatcatattcaagtgggatttattccaagaatgcagttttgatatttgccaatattcaatgcccatctggagtacaagcatatgataaaatagaaatgtattgacatttatttgatacggtaaactgtgcatgtacctcaagctctcaaatctgcattccccatctacttgactgggaaaccctacaggcattcctgctgaaggcagaagcgtaaggtagtccacagtctcctctgctctttaatattgaaatcgacacatttgccacagctgtagacaagagaaagcaaggcgaggtataaatccccaaaaggaagtgattaaactatctttatttgcagataataatatatgatatctggaaactactatgagcaataaagaatttagcaaactagcaagctataaaatcagcatgaaaaaacaaaccgacttcatatgcacaagcaaaacatagcttgaagttgtaatcagagagaagatcccatttacaataacagaataacattagaaaagaaaagaaagctggggataaacttaagaaatagcaaacacatacgaagaaaagtacaaatgctgctggaagttactagagaaggtgtaaacaaacggaccgtgtttttgaacaggaagactcaacatcacagggaagttagtgctccttgtgtgaatttagaattgtcacatgatccccaataaaataataacagatttttttctggagctagaaaagttaatttaaaattcattcataaaaataaatgagcaaaaatagtcaggaaacttctgaaataaaagtaatgagggtggactagtctcctttaggtattaaaacatattgtaaagtgctgtaactaaaatggtgtgtctattggtggatgactagaagatgtccggaacagaacagaaagcccagaaatggaccccattcgatatggcaatttagtatataataaaaggacatcttgaataactgaataaaatagactttttgataagcattattgaaataagtggatacctatatggaaaaaatacaaaactgtatccattccctacccccatatacaaggatacattccaagtggatcggagatatcaatattaaaaatatgaaactgtacaagtactagaataaaacactagttttagtctctctaacctggaagtggggaaaacttgtctaacaatgactcaaaatctcgaagcaataatgaaaagattgatgaactgactatttagaagctttaaaaagctaaaatattccatatgcaaaaaaatacaatgagcaaaggaaaacaagacaaatagcaaattgggggaaatctttgcagtttatatcccagagaaatggttaatatctctatattaagagctctaaaacagagaagaagaagaaaattagaagaaaaatgggcaagctctatgaaacaagagttcacagaagtgcaaatggcccataaccacaggagaatacgctcaaccttatcaaggtaacacataaaaagtgatggtacacagacacacagagaacaatgtgataaaaatgcaaaagtctgacaatactctgatgaggctcgggggagggggaagaggcattgctgctaggaatgcaatgatacaacccctaattaattcaatccaaacacatcagtgggtgctagaactagtgggagaagtttgatgaggaacaggatagactcctcacaaagtatgtatacatcacaaaggaaaaaaaacggagtaactcgaccctggagaaacctggcagtgagtggttgcagttagcaccaccagtaatggggcacctcagaactgtgtaccactggataggatgcgatgaaaagaacacagcctcgcctctgtgctattcgtgcctacgatgcaagcctgaatcaagttaaaaagaaacatcagatggactcaaactaggaacatattgcacaagaaattggacggcagcctccaaaagtgacaaggtcatgaaagtcaagaactactccagattgaagaagacgaaagagacatgattcctaaatgcagcatacgatcaaaattggattctgtcaccacagaagacgttgtgggaaaacaggagaaaccgtagattagatggcagtcatgtgtcaatgccgacgtcccggttttgatgccaatattgtggttacctggtgagtgttcttggaagtacatactccagtatttgggggtgatgggcctcatgttagcagctcactctcaaacagtttttaatgtctttatacaatttgaaattctttgtaaatttgaaatatttcaaaatgaaaattatctttggcgtttaaaaatgtttctcattctttttcatttaaaacacaaactgatgcagcccctgaagcaggacaagttagcagtaactaattaacctgtttaccttctcactcacaaactcgacttttaggagtttattccaaaaatgaacttgcagacaaatgaaaagatacaggtacaagcctattcgctgcaacaccacttgttatagcaaaagactggaatctaccaaaatgcccatcattaagagaccgactgagtagaccatggtatatccacaagatggcatattatatatcataacagaaagaggacgaattcgagaactagagctatggggaaaaagaaggtaccaaaatagaaatcagcattctctgaatatatttgcttatagaattggctttgaaagcatgtaaatatattttatctattcatagcactaaattaattttttttggagacggagtcttgctctgttgcccaggctggagtgcagtggcacagtcttggctcaccgcaacttccacctcccgggttcaagcaattctcctgccttagcctcccgagtagctgggattacaagcacgtaccaccatgcccagctatttttttttttcttatctttagtagagatggggtttcaccatgttggtgaggctggtcttgaactcctgacctcaagcaatccatccaccttggcctctcaaagtgctgggattacaggtgtgtgccaccatgcccagccagcactaaattaatttttaagcctttggaaaagaaattctaagaaattgaaggcaaaattaagcaaagggacagaattgtatactgagttggtggcataacagtatggaaagtaactgtttcacataactttgaaagatggaaatttgtacatcctagtgggatgtactctaaggacaaagaaaaaaagattttcaactgttttcagccattggaatgttggtgggagtggcatggcagatttgtgtctttaagacagttgcatgagtattgtggggctaaagcaactaagtgattatgttgatgtctttgggaaatgagattttcagcccagtcttaactttaagtctgaattgggactataatgattttaccttttaaaacttaacctagtggcactgagcttcctagtaacagaaaaatagcaagtttcttggataaacacatgattgcaggtcagaagcagataatgtgtaagatgagcctggaacatctcatcattccaagaagcaaagacggtatgctatcaactatcaacatggccttgtcaaaaaaactcttaggccaacttgaagaggctcctgctagttaaagatgggaaaatttacaaatccataataataataataactgcaatggactgaaatgcttcaagtacatttcaatccgtaactattcaatgctgaatttgtatgaaacttccaagtcaaaaatctcttttaagatttttagtaagaaacttgagcttcatcggtgaacataacattttctacaccggattttattcttgtgatgacttcattcaagacttttaatgataacctcttcaaatatttgaaagccgcaattgacaagaaagcttctgccaaagtaggaggtcacaattgctgggaaattatttattgctttttccttagttgagagcaacttttttcttgacattaactagaattcagataattaagtctctttaaattatactataagggtacagtgtttctttaggtcgacagttcttctttttatttctttgacaaaagtaatgaatggttttgtgatcgtgtaaatggatttggaatctgatcaaatgtttttaatatcaggtatttcaaaataatgggcatttctgtagacctacatggatgccgctctaccagtcttcattatttttctttagggcataaacactgacttctttaggattacaaaactgattacatctcacagtttttaacaccgtaacatagttgaaattttgctttgaatccatacattttacacgtacacgttagtatatgccatggtctaaatattagtgtccctccaaaatgtgtgtgaaaattgtaacccccaggagatggtgttaggagatggtgcctttgaggggattagattgtgagggctggttgggattagcacccttatgaaagagacctctgagagctagctagtcccttctgtcatatgagattacagttagaaggcaccatctctaagaaaacaggccctcaccagacactgaatctgcctcagtcttggccatcccagcttgcagaactgtgagaaataaatgtttgttgtttatgtgctacacagtctatgatatttttgttatagcagcctgaactaagttggtatacttttcacaggttcttgcagctgtctattgcattcactcaggtgcccaaagacgtcatttaagaggccgtttttgataccaatatcctctgctttaaccaatcttcaaagtgagaccccttcaccaaaagtaataacaatgatgatgataacgatgcattgttcatagattcttgcaaaactctttggacagccaatgcttgtcaatttgaaattgcaataggaaatttaaacgtttctgcttttgaataatattgtttgaagatgcatggatgacaggtcagatgaccaaagacgaacttcatctagaagatcattaaatcgaacaagcttcgactgcacactgggagaactgatgttagtaacaacacttgatgtgtagcgtgagtctgaatctctcaaaagaaattcttgggctaggcatggtggctcattacctgtaatcccaatactttgggaggatgaggtggggggatcagtggaagccaggggcttgagaccagcttgggccgcatagtgagacccatctctacaaaaaatgcaaaaaattagctgattgtgatgactcatctgtaattgcagctactcgggaggctgagttgggaggatcgcctgagcctgggaggttgaggttgctgcagtgggccatgattgaaacattgcatcccagcttgggcgacagtgcaagaccacatctcaaaaataaaaataaaatagcttcttttgtcaaaaatgacattctgattccatatttttcacaaagcaaaaagcaagtgggaccatagcatcttggattttattagacgtgccattctgataacatcacttaatgaggaatacagctttataggccatcttttacctagagaccttctctgcgaatacaacaatggatttcttgattcccaggctcttcagattgaattttgctataaagtgtttatacctttttaccatcattggtatccaaaacttataatttttttctctattatgtattccaaagtgtttgtgtaagctttgaccatttcatccccagcagtttgtctggtatatggtagatactgtagtgctgccacccaggtcggttcttcagggtgacacagctgtccccagtgctggcacataggctgcccagctcacagctgtgaccttcactgagaactgcctgaccaaggtgacacccctcccatgggtcatcctgtggctaacggcgccacaggaaagcccagtcccctttgaatcagttgaggacaacttaagacccctctattccagagctccccagaggatcgactgaggcctcagctactgccatcctgtgggacagcttctccttctgccctgtcctggcctccccacttcctggcagatgtctctgttgagttccactgaaacttaaactccaaactcttcacgcccagagtctatgaccggggcaaacaattgaagacagggaatttttttttttgtaccttaaatagtgttcaaagcatttattttgagggattcaaactcatgccatacaccaagtgccgttactaacatcagcacttatcaatctgcagtggaagcttgtttgatgtaataatcctctagactgggtttctctgggtcatttgacctgtcatccatgcatcttctaatggtattattcgaaagcggtacttttcttatttcctgtgcttcactggtcccaaacatgttgctgacagtttctaatgcaccttggcaaagtgagtgattctgcaattgcaggaggaattttggctttggctgttaaatgcaggacattggaactagcatcttgtattcagtctgacacagttgtggtccactcatcaatactcccacttcttattgtgtaactgcagacaattttcccagttctgatctttttctgtatgagatcaatgctttagggaaaggtgctggcataatttgcctgatgtcattgcatcttctgattcctttttcattaaatacgacattgagacagaagaagacaggattattggaaaatgcaaatctgaatttgagatcattttcattataatttcctgagtagcaactttttttaccactctacttggtacacttgatgactttctttaattaaaaaacgtaaggacaaaaaaccaaacaccgcatgttctcactcataggtgggaattgaacaatgagaacacatggacacaggaaggggaacatcacacaccggggcctgttgtggggtggggggagcggggagggatagcattaggagatatacctaatgttaaatgacgagttaatgggttcagcacaccaacatggcacatgtatacatatgtaactaaccagcacgttgtgcacatgtaccggaaaacttaaagtataataaaaaaaaaagtttcttattatgatgggaaaatatctctctataaatatgcaacagtattaaaaatatcaacctaagtaattttactaaatatatacatatttaaatataaaagtatataaagtggcctgtaggccttaatggcttcaaaaattaacttttcaagatattttgattgcatacatcctcaagaatgtttcaaaataaatcaagttgaaaaattcaaaaagcaaagcttgcattaaccaaaatgagcaatattgacattcctttttatttgattggacaattaaagttctgaaaaactcatgaatataaatgtcagtgatgtcatctctgatccaaaatattttgaaaactcaattatttgaagatataaaaccctacagtcctctttactgagttgatttaattatggaacttattataacatctttaaaaatctgtaaaaacagtaatttattttgagattccatcagtaatcagatcttgctaaatttacatcatcactagccagaaacgaagggaagggggtgggggagaagaaaattttaaaaatcatttttgttttaataaggaacacctaataccagataataattataaacataatcatacgttttacttagtcacataggtaaaaatactagcaaattaattgaataagaagcgcccccacatgctgagcatgttactgaaccaaactgggtttgtctgtccctgcatgagaggaagacgctgaagcactgggtttttgcagcaaaaaagctttattgaatgtcaagtggtgaggagcaggaggaaagactcaaatctgtctcaccacactgggggctgtaccgggctttataagcatagggtaatgaggcgtgttctgattggatcttgcagtggggtaacgccagagctgaatctgattggatcctgcttcagctttgccatgtccatttcttaatccagtccctgctcctctgcctgagcacttaggttcccccaccgtggttgcatgcttggttcatctgagtgtgctcagagtctgtagtcttcaacccgggggtccgtggcaactgaaaaacaactcacaacctacttacacacaagtcgaaccacattgtgaagcggcatttttgtctagggtaatacccaaagtttgttgtctcacgctgacgaaatcaaggacccggacacacaaggagtgaggttaagagtggaggtttaataggcgaaagagagaagagctctctcctgcagaggggtccggagtgggtttttccagtccgccacaaaatgcaaaggattttacagatgagctggaggaggcaatgtctgatttacatagggcatgaaagattggtcagaccaggtgtgccatttgcataaggcacaaaaaaccaggactggatgcgccatttgcatagcctccaaaaatctggccacccacaccctaatcttttattatgcggatgggttatctcccccgctggtgccttgttgcctgcatttttactgtacacgtggtgacaaagaaaacggaagatggagcctccatgttgaatgtgtctggccctcaggtagcccttttctgttggcacagctgccggcattcacctgtgcaagtttctagcttgcttatctatgtctgcagctcagtttttcaggctgctctttgttagaaaagaaatgatttgggagctgttttctgttaaaagggaagccttgccaaagactctcttaccctcactatctgcctaaataatttctttctagctcctgtatcaattggtcctgtgcctggtacagacaaacaaattcacagatgagaaacaacctgcaagtgaaataaaacagcttgataagaggggtccatgggggtgtcagggaagtgccgtgtggctcagccaacctgtgcctttctgcagcagatcctctcaagagagttaccgggttcagaaagtttacaggaaccacatgcatagttttgttttacttttttttttttttggagtactttcagattcataggacagttgagtagaaagttaaaagagttttgatatactctctgcccaacatgtacaaagcctctcccactatcagcatcccccaccagagtggtacctttcttatgagcagtgaacctaccttgatacatcactacccaaaatccatagtttacgtgagggttcacgcttggcactgtgcattctgtgggctttgagaagcatatggtgacatgtatcccccgttatagcctacagaagagtttccttgccctcaaaacccccatgctcctcctgttcacccctcctgactgccgacccccagcagccactggtccttttgctgtctccatagtttgaccttttccaaaatgtcatatgtagttggaatcacacaacacatggcttttccagaatgacatctttcactgaggaatgtttaatgcatgcgtgtcgtgaaaacacagcatatatatagtgaaaacagcatgaaatgtaacttcaacagctgcaattttttttttcttttttgtgacggagtctcgctcccttgccaggctggagtgcagtggtgagatctcggctcactgcaacctccgcctcccaggttcgagcaatactcctgcctcatcctcctgagtagctgggactacaggcccgcgccaccacgcccagctaatttttgtgtttttagtagaggtggggtttcatcatgttggcccggatggtctctatctcttgacctcgtgatccacccaccttggcctcccaaagtgctgggattacaggcatgaaccaccgtgcccggccaacagttgcaaatgtttgaatggctgtaaacggtggtttatggctacaaaaactaacagatatccctgtctctgggtccctgtgtaacctatccgaggcacagtgagagaccactgcactgtcccacctccttcttccccatccactcccagaaatcctctcttcaggtaggagaaactgctactctctgatccaggtttcacatatttccgtgggatataaaacccctagtgcctgaaactgctcttctggtttctcctttcacctgtgattattccctgagtgtcgggggcttcaggacagaagactttgtcattggctgtgagcatcaagacagtgtccaatgggtttaggctgagagccagctcagccaggtgcctgcgtggggggaattatccagtgaaaagatatttgtctgctcagtgaaaaccagaaaggagcataacacctgtcacgttaccagcctgcctccaggcctgccattggaggcacagcaagggtctaatgctaatcatccggggaggaagtgtcccttgaggcttagtctgagcagcgggaggccacgctgcacacttgaaaccccttttgccttgacttttctgcagcatagttggactaagcccttgtcgttggcttaagaaggggcagggttatgtaaccctcaataattaagacctttccagccataaccactcttttattttcaacactgtcaagaaggatttgccggctgtaactctttctcgcttgagggcatttttaattccattgtccacaaatttctgagtcatttctgatggcggtaatcaggacaaagagaagccgaagacctgggaataaaagcaaggttggcgattttttgaattaaacctagggtattgagagaaaggaaactgaggctttagaacctcccttgtcctgtgactggggaaggagagtgtgtgcccacaggtcaggctccgaatctgacaccagggagcccaggtagagtgagtgtcacagccaggggctcaggtagagtgagtgtcacagccagagacccaggtagagtgagtatcatagccaggagctcaagtagagtgagtgtcacagccaggggcccaggtagagtgagtgtcacagccaggggctcaggtagagtgagtgtcacagccaggggcccaggtagagtgagtgtcacagccaggggcccaggtagagtgagtcacagccgggggcccaggtagagtgagtgtcacagccagggacccaggcagagtgagtgtcacagccagggactcaggcagagtgagtgtcacagccaggggctcaggtagagtgagtgtcacagccagggcctcaggtagaatgagtgtcacagccaggggctcaggtagagtgagtgtgagagctcgtgattttaggtagcccacataatgagaagggaggggaaaatgccttgttaaatgggtgaactcaggaatttgtttctctgtaaacatggtgtgccccagagaggcactgcctccaggatgcaggaccagaacttgacgtgaggattgtgctgcagccacgcaaaggtacagacgtcctcttgaatctgcaggaaatgactacttatttaaattatgcaaatttttttgttgcatatgatcctcatagccttactttagagaatttaacaacatttgatatttggtattctggcattcctgagtcagtaattgggcttcgtgaaaccccagagctaaacctaccgagaatgagatgccgtcctcaaccccagaggttgtgggttctaagagaaaacgtcacaacaaatgttggtcttttcccaatagctcctggcgtttattctttcttttcccttttcttcctttttctccttcctcctcttgtgttttcttttctttctttcagcagagattgttctggtcatctattgctgcctaactgactaccccaaaacttagagattaaaagcaacacctgtttatatgtcatgattttgcgggtcaggagttggagcagggcttggatatgtgaccgtctgtgcctctcattcagttgggaagatggcttcgtgcacacgttggcgccatggctaggaaagcggaaaggctggctccctgggctgtccactgggcagctgcccctggcctcgccagcctgcagcctcaggatccccacactcctaccgctgctcagggctcccggaaggcagcagaagctgctagtttattaggacctggatcatactctattggtcaagcagtctcagagcctacattgaagggtttcagacatagacaccacctcttcatgggaaaagtatcaaagaatatgcagcattttgctttgctttatttttttttagggacagggccttactctgttgcttggagtgcagtggcaggagcatagctcacggtaacctcaaactcctgggctcaaaccatcctcccacctcagcctcccaagtagctaggactacaggtgcatgccaccatgcctggctactttttttacttttgtagagacagattatctcaccctgttgcccaggctggtctcaaactcctgggctcaagcgatcctcccaccccagactcccaaagtgttgggattacaggcatcagtcaccatgccctgcctgcagcatgtttgaaaagtgagatttattgtggtttcataatttacatacagtaaaactcaccctttctagagtacagttatatatacattttcacaaacatctttagcccacattcaccagcgtgacggagatatgactatttctgtcacctcccccaaaagtctttgtgcttttatattcacccctttacccccaccccagcacttggcaagcactgctgttttttcttcttatatctttgcctatttcagaacatcatataaatggagcatgcagtgtgcagtcttcagaacctggcttccttcccttagtgtcatgcatttgagattcacctgtgcgttcatgcgtataagtattttgttcccttctactactgagcagcatcccattccatagacacactacagtttgtttcccatccattggtttaaaaacatttaggatgtttgcagtttggggtgattattaaagctgctatgaatatcacatatagattttatttatttatttatttagagacagggtctcactctgtgcccaggctggagtgcagtggtgtaatcacagctcactgcagcctcaacctcctgagctctagtgatccccccatctcagcctcccaagtagctgggactataggtgtgtgccatcatgcccagctacttttttgatttttttttgtagggacggggtctctctgtgttacccagactggtttcaacctcctgggctcaagcgatcctcccacctcggcctcccaaaatgctgggattacaagtgtgagccactatgccccgcttcatgtagatttttatgtgaacttttacatgtcttgtgcacagttacccgggggcaggattaccgggtcacgtggctcgcgcatgtttaacttcgtaagaaagcaccaaacggtcccaccaggtggccgtgccatgggcatccgcatctcaaactgcgagggccttgggcactccacatcttcacggacatgggttgttattgctgttggtttgtgatgtttgagtccttctaataggggtccagggcatcccatcatggtaaatgggatggtgaggttctcttcactcatggatttcctgtcgttctattggctttggtgaagtaactattctttttgcgtacatttttggttttcttacagttgaattttgaaaattcttttttctgcatagtaggtttttgttctttttttttgtttttttctttttaagagacaaagtcttacttggttgctcacggcagcctcacactcctggggtcaagggatcctcctgcctcagcctcccgagtagcagggactacaggcatgcactaccacacccagctgatttttttttttaattttgtaattctttgtagcggtggggtctcactatgttgcccaggctggcctcaaagtcctggcctcaagcgatcctcctacctcaacctcccaaagttctggcattccagccgtgagccatgagccacagcacccggcctggataaacgttctttattgggtatctgtcttgcacacgttgtctcccagtctgtggcctgtcttttcatgaagtcagctttattcattttttttcttttatggattatgtccttgatattctatctgagaaatttttccctaacccagtgtcataactgttttttcctagaagtattaataattataggtttacatttatgcctctgatccattttgagttaggttttataaatggtaagaaatatagatctagattttgtcttattttgtgaatgaatgtctaatatttccagcaccatttgtcgaaattactatcttttctttgtgcttttattgaaaaccagtgatatatgtgtgagtaatttcttgcctgtcttctctgatcagtgtgtccagcccttctccagtaacacccgttttaattactgttgatttccagttagtcttgaaatcatacagtaaaggttatccaaatttttttcagacttgctttggctattctagttaccttgcttttccatatagattttagaatcaccttttcaatgtctaggagatatctagctgtgattttttttttttcttttttgagagcgggtcttgctctgtaacccaggctggagtgcagtgtagctgggatttagattggggttttattcactatattgattggtttggggagaattgacctctttactgtgttttcttccaatgcacccatgtgatatgattctgtattgacttaggtgtttggtttccttcattcgtgttttgtagttttccgtgcacagctattgcacgtagtttgttaaacttgtatctattttatgtttttagagcttaaatgagatattagctgtaggcgttttataggtgccctttttaaaatttagaatgttcctttaaattcctactttgctgagagggttttttcttttttaaaaaatcacaattgattattaaattttgccgaatgcttttcctaaatctattaagatgttcatatgtttttctattttattctgttgatgtgatgaattactttgattgttattcacatcttgagccagccttccatgtataagatacacctcgcttgatcaggctagactatgactgttatatattgttgaattttattttctaatattttgttgaggatttttttgaatttgtgttcatgatggatattggtctatagttttccttcagaggctttttctgattttggtatcagggtaatgctttagaattggtttaatttattcctcaaatgcttggtggaattcatccatgaaatatgcgtagttcttacctttgttcctctggatgctgtgtgtctgcgctcccaaagcttctgtcctctcttgtagctcacattcagccttcggccattcattgaggattttgggtgaatttcagaatttccattgtctcctcctcccgcgctctgtgacgggtgagcaggacccatcctgactccttggacaggcccatctttccttgtgtttccgaccacctggctggtatgcaacctaagctgtcttatgggctcaggaaaagtgattgttttgtactttgttcaacttttcttgttcttaggtggatgtgatgttctttccaatgctcggcatcccaggcacagcaagccctgtgtccatttttaacccacacattttacaggatggcaagtagggcagtttcctggtgacttagagagggggccgaggggcatcacagccatgaccagcagtggatggggacagagggtcctcctgcatgcctgggaagagaagacttgaggggcttggccaagtttatgtttgtctcatctctgcctgagacgggcttttggggaagggagccgagaagagtgtagcgattttcaccaggaccacatgggatcccgtgtgttccggccgagaagacccttgtttttctttctctgcgtggatccacaggatcttaggcttctgtgcctcactttagaacaagcacctgaagaaccaggaccttccttccacccagtggaagccttgatggtgcagccggaggcttggctcctctctgcaggccactggggttcccatcctgaagaagctagccctgcccactgccctttccggaaggccttcagttccccattgccttatgtatgcgtcatcagccgtgctgctgggcacggtagacaatcccagcgagacccgcgcactgtcagcaccccgcttccccccacccctcgtccagccgtgctccgtgtgcacccatcctcgccaggctccttggcaacattttgccttttcccatggctctcccagctgagagtgcccttctcaagaacttacccctcacaggccacccttcctcccaaacacagtccagatgaggccctccagccctcccaggccagaggcagtcatctgcccttcacgagtttgctgctctgcagagcatctgcctcttacagttacacgagcatgtcccctagaaagggcatgccctgaaggcagtcatttggcaggtatataattgggttcaatagctgttctgtaaaagagagaaacaaactgtggaaaatccaaaaatgattgtccccgttgacagacaaagagaaatttaacctccaacagcatatatgggacaagggtgatgattttgtttgcttgttccccaccccccgcctcaatgtaatgaacaatttagcttgaaacatagtggtatatattgagggaggatttctagatgaaaccttgccttgatctcaaatatctgttcattgaaaaagagattagagaaagctttgcttgccgtccgtcttggaaccacaggaaaggcccatctgtggaatgagaggatggtctggtccacctttctgcctatgccttaaagaattctgcaagagaaaatgaaaaatagcccaattctctttcttggtaatgccactgtaagcttcccaaaacattcatcacacttcctcggtctcagtgcaataattgcctgtgagcatgatggcagctaagggtttcctttctgtctctccaccccatggtccctcctgccatttgttctgctgtcatcaatgactgccctgccacagtgcccaccgcgcccccgcagaacgtgcagacggaagccgtgaactccaccaccattcagttcctgtggaaccctccgcctcagcagtttatcaatggcatcaaccagggatacaaggtacgtggcctgggttcagggcctgtgggcagctgtcattgtctggagccacagcgcgacgcagctggaggcaccccctcttgtgtatcaagagctggttgcattaagatacagggcgtcttgaccttggtgagaccaccatttatccaaagtcttggcatcagctctgcaggttcagaaattcaaattcctagttatcaagaggatggttcatacatcagtgagcaatttcttatgagaaaggccattcatttttaaatggtgggtgggagacgtgtctcagtgattagaatgaatatttgcacaaactacttcttcccagaaggaggtcctctcaggagaacacaggccccgagcaaagggaatggtgtgagtgatatttccatggagaaaggatagttttctctcctccctttctacttcagggagagttctgtttaaagaactgagaccagttgattccagctacccgcccatactgaattagacacatagacaaatttccatcatccgacttcttgtgtctttagctaccagagtgtgttaacttcactgatgtaccaggatacaccatcacaaagcacagctgatcctccctttcagatcagcttctcctgattggatttgggagcgcaccttgattttagctacaataggtccactaatcgtctttaatagacgatggacaggggaagctctatacagtgaagggattccatctagtttcctcaatacctggtaatttcacattcagagggtgagtttcctcagacacaaggttcagttttcttttcccacaatttgcattcaacttactaaaacactgatttgtctgccagaaaggcagaagtagctggaaattttccctgcctttcgtttaccctcagaagtatccaaagccagaagcttttgtgaaagaaaatcatattgatcaagcaagatgcttttgccttcttccctctcctgtcgagtctcgttggcaaggctgcagtgttcgtttgatgacttcgctgtcagtttgatctgtgtaaatacgctttgcgtcctgcagcatgtcaactttcagacccaattagtcctagaaatgtttggtgccaaaggaattaaaagtcacacacctacgtaatgctgccaaaacatgaacacgctttccttaggttgtggatacagtctgtatttctttaaaattgtaagcagtctcctaaaatcctttttgcgaaactagtgtgatataaattataaataattaagattattgctgttgaatcatggatgtcttttttgagacagagtaggtgctttctagaaaaatatttgtatttgtttcattgtgctgtttcagctgaattaacagatggtttcatctttattctttactgttaaaatatatattatatactatatggtatatattatatataccatatagtatatattatatatagtatatataatgtattatatatacatacatactatacgtatatattatatatactatatatgttatatatatgctatatatgttatatatgttatatatagtatactatatgtgtatatgttatgtatgttatatatagtatactatacatatatatgttatgtatgttatatatagtatactatatgtgtatataatatatatgtataatatatacatattatatataatatatgtataatatatacatatagtatatatgtatatattatacattatatatgtgtatatattatatatgtatacataacatatactatatatgttatatagtatataggttgtatataatatatatataatatatactttttatgtatatatgttatatatggatatatgtaatatatattatatatatgttttttaaccttcttaagtgaagagagggtgaagatttgagggagtgtccattattctaatatgagttaagtagttatttacatatacaagtataaaatacatgtaaatatacatgcttgtatacaaaaacctataaaatatatttttatctcaacttttttcaagcgtgattataaaatgcaggatttatggactttcttaattatgactttacattttaaaagacaaaataaaattctgctgcagacatgagtgtggagaaatgccattgaaaacaggctgtctttttcaccctgttccatctcagcttctggcatggccggcagatgcccccgaggctgtcactgtggtcactattgccccagatttccacggagtccaccatggacacataacgaacctgaagaagtttaccgcctacttcacttccgttctgtgcttcaccacccctggggacgggcctcccagcacacctcagctggtctggactcaggaagacagtgagtattcctttctgcgtgtctcttaagtcacttgtcaaagaggtgtataccgctgcaacttccagaatcaggcaagggcagaggtggatcacgaggaggccccggatttttggagtgcttgcagtcagctcacctagggagatcaggcatcagtactgataatgcctcgcagaggatggcacgtggacagtggagggtggccttggctcaaggaaggagctctggggacagggggtggagaatcaggttccagctgtgtggccacagctttggtcttgctgaacttgctcttcatgtagagttcaatttctgattccctcacctgcttccatgatccccccccccccgacgtcccccagcccattctttcctgaccctcgctcccagggtccttttccccacgcccttctaagctccctgagtttgcattacctccatctggtcagttcgaagccactccttctctgctcacaggccagctgacgcatctggaaaacgttagctaatgaagttaccccgagaaaatagtcacagatgcacacaaagatttatatatatacaaggcggctcgttacagttatttgtagctggaaaaaatgtgaaaagcattcagatgttccagatggggagaattgggaaaaagtatagaatgacaacataagaaatattttgtagttgttgaaaaaacgaaactctgaagatcaaaaattgtgcgcaaaaatggtcatgatataacattgtgaaataatagtatacaaaactatgagatccaaattttataaaaatatactgtatgaaatatgaacagagaaaagaccttggaagaaatacgtcacacaaatttaagacttgttatccctatgtggtatcattatgagtagttttggcatatttcgttgtatttttttgcattttctagtttctaccacgagtctgtactccctctgtaatgaaagttaaaactagaataattagggccatgcagtggttcatgcctgtaatcccagcactttgggaggctgaggcagttggatcacgaggtcaggagttcacgaccagcctggccaagatggtgaaaccccgtcattacgaaaaatacaaaaattagctgggtgtggtggcaggcgcctgtaatcccagctactcgggaggctgaggcaggagaatcacttgaacccaggaggcagaggttgcagtgagccgtgatcatgccactgcactccagcctgggtgacatagtgagactctgtctcaaaaaaaaaaaaaaaaaaaaaattaggaaaattattttttaagtcaccctgggctgctgcttgtctctcccccagtgctggatgggctcagccttctgaacttgtctctactagagtttggccgtcgccagctccaccccgtgctgctcccgtttttggactcccagcctcaccgcactcccagcaggtgacatttgcagaggccaaggccaccaagacggattccttgccttcccacttcaccctttatttccgtgtccttacgcttgcctctctcccctttcctctcaaacgatgcagtatggcctttctaagggtcctccgtcatcctgttcccttcttcccctctctgtcttcatggcgctattacttcttccaatctttttactattggatcctttccctcctcccacaaatatgttcaggtctccctcactcaaaatcggcagctccctgactgtgctgcccctggagctgccgggatggctccccactcccttttagtctaaccattgctttgaccttgaacgccttatgttctccttgacccttggcagcctagctttctccttgccactctcctggaacaatctcgccattgactcaaggtctatgtcaaatgagtgacaggggaggaatagaacatggatttcttgaccctctgagaccaacaatcaatccctcctcacaaaaaagatgaaatgaaaagtagccctgctgctgctgtgaattgatcccagaagttcttcccatactctgcctttgctctgctttctgcttttgtttaactgattttggctttttttgttttttgggttttttgttgttgttggtggtggtggtggttttttttgttgttgttgttgttttgagacagaatcttgctctgttgcccaggctggagtgcagtggtgcaatcttggctcactgcaacctctgcctccagggttcaagcaattctcctgccttggcctctcaagtagctggtattacaggcaccggccaccacgtctggccaatttttttgtatttttaatagagatggggtttcaccatgttggccaggctgctctcaaactcctgacctcaggtgatccgcacacctcagcctcccaaagtgctgggattacaggcataagccaccacactcaccaaggttaactgaaatttttattgagagcattacagattcatatgcaattatatgaaataatattgagaccgtgtacatttagcccagtttctgccaagctgacatttgcgaaactatagtattgcatcacgtccaggatattgacactgatgatacaattcacagatccgatttgggtttctccagttttgtttttttctcttttgtgcatatgtgtgtgtttagtcctgtacagtttgacacatgtgtaggtttgtgtatctaccacgataatcaagatcttgaatgtttctaaggccacaaaaatcatctgggttcctttatagccacacccaccttcctccagctcttcctttctaacctgtatgcctttcatttccttttcttgcatgatttgcagtgtctaggatttctagtactatgctgaataagagtgatgagaccagacatccttgcctgcttctcacctgagaggcaaaacattcagtcgttcactgttaaggatttttttttttaatcaagttgaagttattcctcactattgctaattggttctgagtttttgacatgaataaatcttactttttttcacgtgctcttactgcatcatttgacatgatcatctggtttttcttcttagcttgttggtctgttagattacattgactgatttgcaaatgtcaaaccagctttgtgtacttaaattcaacttggtcacagtgtataattcttttcatatgctgttggattgactttgctagcacttggcgaaggacttttgcatgtaagttcatgagagatattaatctgtagttgtctttttttgtgtgttatctttgtctggtgttggtatcagagtaatatggtcccatgaaatatgtttagaagtattcccacttctatgttctggaagagattgcgtaaaattggtgtcattttctctttaaatgtttggtagaattttccagtgaaactctcagggactgaagaattctttctaggaatatttttaatataaatgcaatttataaatggttttaggactatccaggttgtctgtttcatcttggctgagttttgggagttgttggttttcaaggagttgatcctctaagagttcagatttgtgagtatgaaaatgttagcagcaccaccttcttattggttgcaggatctgtagtgatgtcctgttttttattcctgatattgatgattggtttcttctggctttttaatgttgtcattcttcctggaggttcttcaattttattgcttgatttttttggtttgtttttgttgttgttgttgttgttgtttttgttttttgtttttttagaaccagcctcttgttccaggtctcctcttcttcatggtctccttcattttcaactttattgatttctgctctttataatttccttcctctgcttgctttgagtgtattttgctctcccttttctgctttcttgaggtagccatgttggttattggttgaagacctttccttgtttccagtgtgagcgtttagtgctgtacatttctgcttccatgatgctttagctgcatcccagatgttttgacactctatgctttcattttcatccagttctctgtatttttatttcctttgagatactctctgtgacccatgaattaattggaagtgtgctgttcattttccatgtgtttggagattctattgtctttctgctattgataatctgatttgattccattatgatcagagaacacacttcatataattttagttattttatatttgttgaagtttgtttaatggcctaggatatggtcaatcttggtgaatgttcaatgaatgattttttaaaaatgtctatttctccttttcaattgtaaattttatgtctcagagaaaactggaaataatctcaattttttttttttttttagaattttctaactgaatcattttttggtaggcagggagcctgtttatcctatttaggataataacacatctttgtaaatgtcaaatatcacattaaaagactgaaggtagggttgaagtcacctctggggggtgtagcttttaaaaggaaagtttggagcctgaatgagaggggcttcaggggccagctgaccacagtcacctggtactggcctccttcataaagaagaacaagaacagcaagtaggtaaccacacttcaaatagatccaagagagaagctggaattcaatagagaagtgacaggaagcacctatggcaaggaggaaagtgaagtgcagcagctcctccgggactgagatcggctgggaacccagacaggttccccactgtgggaaaagggaaagggagagacccccgtggtccacattcccaccacagactcctgcaatccgagccacaggaaagcccctcaaaactcacaggcccaagactcacgtagggagactctcacagggagaccgtgtgatgtcctgctccagagagggagcccacgctgcaccccacacgcccgagcccagagcagctactatgcagtgctgctcaaagagcccagccccaccagaacattccgccgtgggtcccaccagaccattccgccccgggtcccgacagaccattctgctccgggtcccgacagaccattccgccccggctcccgacagcctctgcatctccatattctgcagccccactgacatcccctgcccacaaccaccaccactgctggctgctgccaccagaggcaaagcacaaaccattggcagtgacccccagtggtggggctgctgggcattttcactcatcttgaggacagacttcgcttccaggcaccctgaggtcagactctcccacccacagttgccacctgggtctgaagcacacctccccagcagcagggccgcagtgcagccattgccagccctaccaagtgttctgccaggaacctgggggtcaccccaccccagctgaccacagctagcaactgcacacaccaccaggggtcctgaggacaggcctgcttggcttgctcagcctcccccagtatgagcaacactatccagggccctgggctcaccctgccctgtccaccactatgagcacctgagtacttctcctggggacctgaagtcgggcccacccaacctgctgcaccatcacagctggcacccattcctacacaccacccctgggcctggggactggcctgctcagcctgtcacagccaccagcaataccagtgcagactgctaaggagccaggggattgtcccaccactgctactgtcactgcctatagcatgcctgctgtccagggccttgagaacccacccacctgcttggccccctgcagccattgccagcacctgagcaacccacctagaatgccaagaatgagcctgtctggatcactctgggatgtaaggacaggcacactcagcccactgctgccaccactggggcccaaggattggcccacctggtgtccctgtccccagcaaaactttaccacagcctctactaacaaccacaccctaagccgctgaggaaatcacagacaccactgatgctgtttacagccaaataaattatatggagactacactactgcttcatccagaatcaaagccaaagtaccctatccaatcaacaccatagatacatcttcaggaaaaagccctcctttatgaaagcaaatccaaaaaattagaagaagcaactgttacaccagatgtgcagatatcaacataaggacacaagaaatatgaaaatgcaaggaagtataacacttccaaaggaacatggtaattctctagcaacagattccaatgaaaaagaaattatgaaatcccagaaaaaaaataaaaaataatgatattaaggaaagtcagataaaagagacacagataaataatacaaaataatccaaaaaacatttcaatacatgaatgagaaatttaccaaagagataaatattataaaaaagaaccaaacagatatccaggaactaattaattcattgactgaaatttaaaaatacaatagtaagcttcggcagtagactagatgagacagcagaaggaatttcagaatttaaagttgaataaagactatgtgatatatgagtcaccataaaggaatgagtatttgaatttttgatgtcccagaaggtgaaaagaaaaccaaagggatacaaacctgatttaacaaaataatggctgaaacccaagtctagcaagagatttagacatccagatatgggaggctcagagatccacaaataaatagatactattcagaaaggtcttctccatggcacattgtagtcaaattatcaaaagttgaagacagaattccaaaaacaccaaaagaaaagcatctactcacttataagagaacccccatcagactaacagtggatttatcagcagaaaccttacatgccaagagaaaaatgggatgatatattcaaagtactggggaaaaaaataacttgttagccaagagtactatatgcataaaagttacccttcacaaatgaaagagaaataaagtatttcctagataagtaaaagctgagggaattcatctccactggactggccctacaagaaatgcttaatgaattcccacacctgaagtgaaagaacaatatctaccatcatgaaaatgtacaaacgtataaaacccattggtagagcaaacacacaaataaggaagagaaaggacccaaatgttaccactacagaaaaccaccaaacctcaaaaataaacaatgagagagaaagaagggaacaaaggatatataaaccaaccagaaatcaattaataattactagaataagccctgacatatcaatagtaaccttgaatttaaatagattaaagtatccaaaaggatagactggctgaatggataaaaacaaaaacaaaaacaaaaacaaaccatgacccaactataggctgtgtacaagaaactcagctcacttgtaaagacacatgtagactgaaagtaaagagatggaaaaagagattttgtgcaaacagaaagcaaaagtgaacaggagtaggtacgcttagataaaatactttaagtaaaaaacagtaaaaagagacaaagaaggttattgtgtaatgataaagttatgaattcaacaagaggatataacaattctaaacatatatagaccaaacactggagcactcagatatataaagcaaatattattagatctacagggagagacagcaatacaataatacttggggactttaacatccccctctcagcattagacaggtcatcttgacagaaaaataacaaagaaacattggatttaaactgcgctttagactaaatggacctaacagacatttacagaacatttcatctaatagctacagaatgcacattcttttcatcagtacatgtaacattctccaagacagaccctatgttaggacacaaagcaaatctcaacaacttttaaaagactaaaattcgatcgatatcttcttagaccacaatggaataaaactggaaatcagtaatgaggaactttggaatctgtacaaatacatggaaattaaatagcatgctcctgaatgacctttgggtcaaggaagaaattaaggaggaaatttaaaaatttcttttttttttttttttgagacggagtcttgctctgtcgcccaggctggagtgcagtggcgcagtctcggctcactgcaagctccgcctcccaggttcacgccattgtcctgcttcagcctcctcagtagctgggattacaggcgcccaccaccacacctagctaacttttttgtattttttagtagagacggggtttcaccatgttagccaggatggtctcgatctcctgacctcgtgatccgcccgcctcggccttccaaagtgctgggattacaggcgtgagccaccacgcccggccagaaatttcttgaaacaaatgaaaattgaaatacgacatacagaaacctacaggatacagcaaaagcgatgctaagagcctacaataaatgcctacatcagaaaaaagtagaaagatttcaaacaatctagtgatacacctcaaggacaaaccaaacccaaaattagtagaaggaaagatataataaagatcagagcagacctaatgaaacaaagacttaaaaacaatacatgtgttttttggctgcataaatgtcttcttttgagaagtgtctgttcatgtcctttgcccactttttgatggggttgtttgtttttttcttgtaaatttgtttgagttcattgtagattctggatattagccctttgtcagatgagtaggttgcaaaaattttctcccattgtgtaggttgcctgttcactctgatggtagtttcttttgctgtgcagaagctctttagtttaattagatcccatttgtcaattttggcttttgttgccattgcttttggtgttttagacatgaagtccttgcccatgcctatgtccggaatggtaatgcctaggttttcttctagggtttttatggttttaggtctaacgtttaggtctttaatccatcttgaattgatttttgtataaggtgtaaggaggggatccagtttcagctttctacatatggctagccagttttcccagcaccatttattaaatagggaatcctttacccattgcttgtttttctcaggtttgtcaaagatcagatagttgtagatatgtggtgttatttcagagggctctgttctgttccgttgatctatatctctgttttggtaccagtaccatgctgttttggatactggagccttgtagtatagtttgaagtcaggtagcgtgatgcttccagctttgttcttttggcttaggattgacttggcaatgtgggctcttttttggttccatatgaactttaaagtagttttttccaattctgtgaagaaagtcattggtagcttgatggggatggcattgaatctataaattaccttgggcagtatggccattttcacgatattgattcttcctacccatgagcatggaatgttcttccatttgtttgtatcctcttttatttcattgagcagtggtttgtagttctccttgaagaggtccttcacgtcccttgaaaacacatgaaaaaatgctcaccatcactggccatcagagaaatgcaaatcaaaaccacaatgagataccatctcacaccagttagaatggcaatcattaaaaagtcaggaaacaacaggtgctggagaggatgtggagaaataggaacacttttacattgttggtgggactgtaaactagttcaaccattgtggaagtcagtgtggcgattcctcagggatctaggactagaaataccatttgacccagccatcccattactgggtatatacccaaatgactataaatcatgctgctataaagacatatgcacacgtatgtttattgctgcactattcacaatagcaaagactttgaaccaatccaaatgtccaacaatgatagactggattaagaaaatgtggcacatatacaccatggaatactatgcagccataaaaaatgatgaattcatgtcctttgtagggacatggatgaaattggaaatcatcattctcagtaaactatcgcaagaacaaaaaaccaaacacggcatattctcactcataggtgggaattgaacagtgagaacacatggacacaggaaggggaacatcacactctggggactgttgtggggtggggggaggggggagggatagcactaggagatatacctaatgctaaatgacgagttaatgggtgcagcacaccagcatggcacatgtatacatatgtaactaacctgcacattgtgcacatgtaccctaaaacttaaagtataataataataataataaaaacaatacaaatggttaaacaaaactcagttttagggaagatacacaaaatcaataaactgctagctagacttaagaagaataaaagacagattacttaaggaaacaaaatcagaaatgcaaaaggagacattataactgataccacagaaatacaaaatatcatttgagactcttactaacaactatacactaacaaattggaaaacctaggagaaatggataaattcctgaacacatacaacctaccaagattgaatcagaaagaaacataaaatctgaacagactaataatgggtaatgagattgagtcagtaataactctcccaacaaagaaaaacccagggccaagtggtttcactgacaaattctaccatactttcaaggaagaactaaaaccaattctcctcaaactattccaaaaaattaaagaagaggaaattctttctaactcattttatgaggtcagtgttacccagataccaaaaccagacaaggacataacaacaaaaaactacagtccattatccctgatgaacatagacacaaaaatcctcaacaaaaatattagcaaactgaatccaacagcacgtcagaaatataatacaccatgctcatgtgagatttatcccagggatgcaaggatggttcaacatatacatatccataaatgtgatacatcactccaacataataaaagacaaaaaccatgtgatcatctcaacagatgcataaaaagcatttaataaaatttaacatccctttataataaaaactctcaacaaactaggcatagtagaaacatacctcagtatgataaagtctgtatatgaaaaacccacagctaacatcacactgaatggggaaaagctgaaatcctttcctctgataactggaacaagacaaagatgcccactttcatcacacctatttgtagtactggaagtcctagccacagcagtcaggcaaaagaaaggaataaaaggcatctaaattggaaaagaggaagtcagattgttctctttgcagatgacatgatcttgtgtctaaacaaacctagactccaccaaaaaactcctatatctgataaataaatttggtgaggttgcaggatacaatagcaacacacaaaaatcagtagcatttctataaaccaataatgaactagctgagaaataaatcaagaagttgattccatttacaatagctataaaagaaaaacatatctaggaattaatttaaccaaggaggtgaaagatctctacaaagaaaaatacaaaacattgatgaaaggaactaagaaactgaagaagacacaagtaaatagaaagacatcccatgctcatggatcagaagaattagcattattaaaatgaccatactccccaaatgaatctaatgactcaatgcaatctctatcaaaataccagtgtcattttcacagaaatagcaaaaaaaaaaaacaaaaaaccccgtaaattcttgtggaacccaaaaagagcccaaatagccaaagcaatccatagcaaaaataacgaaactggaggaatcacactacctatctttgaaatatatgacaagtctataataaccaaaaccatggcatggtattggcgttaacaacagacacatagaccaatggaacagaatagagcacccagaaacatatccatatatttacaaccaactgattttcgataaaggtggcaggataccttcaataattttggtgctaggaaaattggatatccatatgcagaagatcgaaattaaaaaataactcaagatggattaaagacttaaatgtaacacttgaaattataaaactactaaaataaaacacaggggaaacacttcaggacattagtgtaggcaaagattttatggctaagatctcaaaagcacaggcaacaaaaccaaaaatagacaaatgggactatatcaaacttaaaaacttctgtacagcaaaggaaatggtaaacagagtgaagagacagcctgttgaatgggagaaaatatttgcaaactattcatctggtaagggattaatatctaaaatatacaaagaactcagctcaacagtttaaaaaatctcatttaaaaagtgggcaagggacatgaataaacccttgtcaaaagcagacatacagatggtcaacgtgtctatgaaaaaatgcccagtatcactaatcatcaaggaaatgctaatcaaaacctcaatgaggtaccattttatcccagtcagaatcactagaattaaaaagacataaaaaatgctgacaatcatgtggagaacagggaactctaatacactgttggtgatgatgtaaattagtacagccacaatggaaaacagtataagttttcaaaaaactaaaaatagaactaccctatgagccagcaatcccactattgggtatttatccataggaaaggagtcagtgcatcaaaggatacccataccccatgcttactgcagcaccattcacagtagccaagatacggaatcaacccaagcgtccatcagtagaccaacggataagaaaatgtggtgtatatacatagtggaatactattcagccacaagaaagaatgaaatcctgtcatttgcagcaacatgcagggaactggagggcattacatcaatgccctcaggaaaacaaatatcacaagttctcactcataagtagtagcttaaaaggccaatctcatggagataagagagtagaatgaaagatactagaggctgggaggggtgtgtcggtggagcagggtggtggggagaaagagaggttagttgatgggcataaacattcagttaaacagaaggagtaagttccaatgctccgtggcacagtagagtgactacagctaacaatgatgtatatttcaaaataccaaggaaagaggatttcgaatgttcacaacacatagaaatgataaatactccaggccataggcactctgaacaccctaacttggccgttacacagtcagtgcctgtaacaaaacgtcacctgtaccatagaaatgtgtacaagtattatgtatcaataaaaaagaaagtaaagaaagcttcagactctcgggtgctggagaaacggcctccttttctctttagctgatggtgctgtagttagttccacacccagcaggacttctttcccaaagctccgaggaaatgagaagttgttgggagagggtagcagtaaagaggaaacagaatataaattttaagctgagacatcgccagctgattgcagcagagctagaggacagcatctttgggcaggaatccaggaagcagaaacataatataaaaggagcaaaaaggtttctttccttctccatcgattgaaaaaagaacaagtcagtgcaaaaatctgtcagaatgtctttctggaggctcacaattgtgggaggatgagatggtcttgacagccattctattttaccatcttccacactagaaaagtgaaatttatcagagcatttgagcttatctgtgaaaagtcttttcaaagtttcacccagatgagtggttgttgtttttttttttttttttttttttttttttttttttgaggctgttaccattttaaaaaaattacgacttgtgttagaaggctttgtccaagtaccaactcagtgctcggtatggaattcaccctaaaaatctaatgtttgtgcaagtgaggctggcagtaaccagaacagggactttgcaggggtgagacttctctgtaggaatcctggatactctttcaggacaactgacacccttgacttcatgctctcctattttaagctgaaagacttgcattttttattactaaaaagatttgaatgtggcgccatccagcaggttcactaggggagtcgtgtggtgtggagctttcagtaggaaccagtgttccctgcctggcgtggagggtgtactcagctgatacatacagaaactgacggatgtctcgtctcttctccatcattcttttcctcccttttccccggttctgcctttgaactaccctttcctcctgcccttttctcctccctggctttgtcgctatgtttctcctgaacgggtatctggaggggtaggcatgggggcattgtcagagaggaggtagggctctcaatggcaggcggggaagcagggccaacccgggcagctgtgtttgtgtttgctgctgagatcaatggatggaggggcactttcaggcaccgcacaggtgcctgtggtgcctgacttagggaatgggagtgcactgtctctcttcccctcatccttccctccatttgctcgtaagacgccagcctccccaaaagcgtttccatttccacctgctcctcatgccttgcacagcagctatggctatagagagaccatggaaggcacatggcagggcttgggagtaacggcatccgggagaacatcaccatcaggacatccacctatctcctccagatagccaggcatcctctcctccctccccatcaccacacagtgtgggctggccctgatgggaccgatgggacctgctatgggaacactaaaaggctctaaacctgggtgagctggtgcaagagatgtgggtcagaactgccagatgtccctgctgtccggccagcagcgacttgctgtgggccctgctgtccctgagtcgcaggcaggtggtccatctgcatgtggggcggagctctgcgcctgtggccgcccttcctcaagcagtttgctttgctgagctgcacctgcatcttggatttttaactcatgttttagactctcaggtcttttctctggggtggcatcctctgatcctaggaatgagtttatgttctgatgagaggttcatcatcatgacagcggctgatgatcatggaacattttcatggtgcccgggacatcctcgtgttttcatgttttattacaatttattcttataattgtctcgctgagttatttttattttccctgcttcacacattaacagactaaggtgtcgagagtgtaatttcctaggcagcaagtagctcagccaggtctgacacccagcttggacgccagcgttcaagcgtaactctgcggctctgcctgcccgtgttagcaagggggccgcagggcacagaagctcctgggaaaggaatttgtttttgctgggattttctcaggccactgcctcgcccctctggaatccttcaggataccgattgggtttggagcctggagttctggaccaggttggcaggtgagcctgcccctgggcccagggtccttttctggtttgcacaaggttacagatggcccccacacaagccagacacggggttgcatacaccatggaggaacactcagaggaggcagttgctcttgagaatccagccagcctgattgttctaatcagattagatcaaggagaaagacagagaatggtttgtgtataaatctcctgccaccagtagctccagtgccctgtgtggctgggatgaagctggagaaaataatgtgtgtgatgatagccaggatgccttgaacaccctccttctttctgcattccactgatgtctcctgcagggttttgcagccccagctcaccactttccttccatagttagaaccttccccacacatctgatcaaaagaaaatttgggctattgtgttaacagatgactttgcttttaattggtagaaccaggagctgtgggacatctgagtttcacagagatcttggacacatctctcaaggtcagctggcaggagcccctggagaaaaatggcatcattactggtaagtaggcctgtccttcaaaaaaggaaaagataagtttgtcctcacaaaaagaagtggctgtcacttcaaaccaaactgctgacagcatggacccgtgcccatggccttctcaagaggaactgaaaagtcttcctggccgtgtggcagagtcccagcactgggactgccccagtgagagccagcctggtctggggccctttactgtgtgggcagcagccatagtttgagatctgttctcctcgcatgatcttagtaggtgtccagagtctctgaccaatgagagtcagtcatgttatgacacatttgttcacatgcgtgtgtcttgcttaattctcatagcagcatggtaaggtcaatatcgatattatgaccattttacagatgaggaaactgaggccccgagagggtgggtgacctttccttcattcagcagatggcactgagcgctcctgtgggcagccagccttctcagacacagccaggtggtgtgactatgaggcttacgtgcctgtgtctcagccctcgtcccacagctgtgagccgcaagggtgagatctgggtcttctgactccagatcccatgttctgtcccctccccaccctgccctccagtgagagccctgaggagactgtgaggcaggtacttcggaggaggttctgagctgtaccagggatgggggctgagccttagaggcccctgggcagtgagatctcctctcctggtttgagggggtctctgtgggagacagctcaccttttttagggtttttaatgattttatttatttatttatttatttatgagacagggtcttgctctctcgcccaggctggagtgcggtggcgtgatctcggctcactgcaacctccacctcccgggttcaagcagttttcctgcctcagcctcctgaagagctgggattacaggtgtgtgccaccatacctggctaatttttgtatttttagtagaaatggggttttgccatgttggccaggctggtctcgaactcctgacctcaagtgatccacctgcctcagcctcccaaagtgctgggattacaggcgtgagccactgcgcctggccaaatttttataatgtctctgaaaaaccttttaggttaaagcttaatttaaatcttagttcaaaaaaaaaatcttggtttgacaaaagcaacataggctctagcctcagatgaggctgggcagggccccctgttctactgttttagtcactctaagagcctcagcagacctctgggatcctcagttacaactgaggggctgtcaggaggacgagttgagagaagttgtatcagtggctgcccactgcctggcccagaacaactcagcctccaacagacatctgttttttttctaaacattaccaaggatttctagcaagccacttaatcttcttctctgtcagccatatataggacacttctgtgtcagccctctctgggggctttgcctgtggcatctcatgtcccggcaggggctcctgcgtgggtattctgcagccgcaccccaaggttgagtgagttgcccgtcctgacgcgagcggtcagtttggagctgagctgcgtctccgctccgtggtggcagcgttctcagctgcctgcgggagccatggaattcaagtgcctgattgttctgtgaagcaagcttatgctctctgggtgtgtcctagaagcctgtgctgggactgtgctgcccagagaccaagagcctcaggtgatctctccctcctgccaggctgcagggttgggggccgtttcttctccgcactggcgtcctggatgacagcggcaatgatgaccctggccacttccactgtgtttgtcaccctagccttgtgggatctcgttttgctttctcagcaaccacacaaggggtgtcttataaccgaggcctggcgatgacaaggctgaggtttagggtggtgacgtcccaccatcacagccaatgggcatgtgcgcattctctcctctgcagcgttgatgtggtgggggtgaggtttgaaccatgctctgaaccccacagcatgggatgctcactttccccatccacagtcctcttagcatctccataatttctcaaagcaccctgaggccacagaaatgcctgacggttctgtttattaagtagttaggtccaaacaacggaagtgttaatatgcgctaacaattataattgccatgtaaaaaatactacacagtagttgaaagaaataatacttgcatttcttttttcagtgaccacagttagttcctaatgggatgtctgcacccgcctgggactgcccaccttctcagaccttgggaccagatggtccctcgtcaccctcatttcccggttcactttggtttccaggcagtacttgtttccttatcacaacatccaccaaaaactctgctttgcaaagacaggatatatccaaggactcgtggcatgctctgacccggaaatggagccacctcgggctggaggctcacgtgtgtcccactggcattgagtgtcctgtgcatccctgcagtgctcctgggaggtcactgcagcatcccaggtgccctggggcacagtgggagactgtgttcctacagtgacctctttctacacagaactccagctacatagcaaacccagtgccaaccccaccactactcatcagtagaatctcctgtaatcatctgtgccaaccagatcccctgatagagcggtgtgcccacagcccatacacaaggtcaccttggagccagtgccacctctcaaatttttttttttttttttgagatggagtctcactctgcagcccaggatggagtacagtggcacaatctcagctcactgcaacctctgcctcctgggttcaagcaattatcctgcctcagcctcccgagtagttggaactacaggcgtgagccaccacgcctggctaattgtttgtatttttagtgaaggcgggggtttcaccatgttagccaggatggtctcgatctcctgacctcgtgatccacccactttggcctcccaaagtgtgctgtgcctcttataagcatatagctggactttgtggggtttttaattttttgtttatttattttttgaaatggagtgtctctctgtcacccaggttggagtgcagtggtgtgatcttggctcactggaacatccgcctcccggttcaaatgattctcctgccttagcctcccaagtagctgggattacaggtgtgcgccaccacacccagctaatttttgtatttttagtagagacagggttttaccatattggtaaggctggtcttgaactcctgacctcaggtgatccacccacttcggcctcccaaagtgctgggattactggcatgagccaccacgcctggcctcaccttaacttttaaaaaaagtaaattaatgaatctggctctgccttccagaagcttatcttttgaagtgcccactttaaatagtgtgaaaactccaggaatggggggaagtcactactagaattggacacaatctgttgcacattctgaagtcatctgagaatcgcaagtgctgagtgtgtacaattaaaagggcctcctgttgcctggagtcgaaggaattaagcaaaggcagggggaactgagcaggggagggcactatagactgcaggaacctagtttaatcttgctttaaaccattcaaagaaaggaaaaacaaactagtgggaggagggatttttaaaagctgagcaggaggctaccattcggaagaagaagactttccagttcagacccttcagggaccagttcagtggctggaattagagctctgcttaccactgatcccagaaacggggctgcccgggtaggaaagaaagaattctggcctaccgtctgcccagtcgcctttcaggtctgcagtcggccatgttttggaaatctggcagagactccttggtagatgtgtgtacacagaaggaattccctttttacagatacacacgttagcccctgccctgccctttgtgaacacagcacacacttctttcctgtttaaagctgaaagaaaaaaatccatgggcataataattcacgttgagccaacatttcacggctaagcagtggttgccaatacttccaatttatgatcgtctgtttcaccagctaatggggcttcatgaactcattttcatgttttatttaaacaaatacctgtagttaaaagcagcagtctgttgtttatggtggagcttgacttcgaagctcgagctttcctgggctgggtgtagccagaggcctgggtttggaggtgcctgtgctgtcaggggcagcaaagttgcagtgagagcaccaggcagactctctgcaggttcctctcggcagccacgttgtccccttctgtgtgtggcctgtgtgttttcccttcctgctcactgtaatgtgcaccttgtgtcacagaagctgcagtggacgcctgcagctctttggaggagaaggtcctagaggagatgagatcggatgttatcaccttaccagcccagcatcaccctgtgcccccagtgatgcccgcatcaggggagctccccccagcacccaccatgtagacatagttttccagtggaacatgctggcagcaccatgaaattctattctgtgctgaaggcagagtgtctcattgagaagagcaaaagaaaaactgtgttcgtgggcaaacctggctgccggtttctggaagtgttggtgcggcaccaccatgctctcgcaggcttcctgcaaaggctgcacctgctattaaaggcagctgcaggagcccaggatgactgacggcttgggcctgggctcagcaccactttacgggccagaggcgctgttggaaacgtaggtttattagccctggtctgtggtgagcacccccagcttccattttaattcgaggcctggaatgagagggaagcacggagtagggggcggctgcgcctgcccgagtaaattgcccattgcccgctcattgtaaatttcagcgtcctccactctccttcagtaaactctgatttatgagggccaggatgcagacagacagtttgtgattggatgcactgctctcttctagagaatttactttagatcaacagaaaattatttctgaagctcctctggccattagtctcagttaggcagccattgggagcaggtaggatgccaagcgggaggtacccccgctcctggctccgggcgcctctctcctctctcctctgggagctggaagcagaggatgcatcccctggccagcactgcctgagccctccacgcacctcccccaaaagctgttgttcataaattaggggacgtctttcccacctcacgcccaccactctgtctgtgctcacaggcatcacacgtcttgggcctgcaccatttctgctggcgtttctctgcagatcagcctctctagctatccgtttggtttttgtttgtatccacaaccatttgagcacactatattatcaatgttgatcctaataaattctatcaacactgctcttcctgaagatgctggaattgccgtgtttcagctctaggtcgacatgacaaacatgacgctgtgtttcagtaaattctgatgaaaaacagcttttaaacaaataaaattttctggcagacaagttgtaatattaaacaaagtctgctcttcccataggttcagagtagaccccgaggatcaaattatttagcgattgaccaggtgtgacccaccaaggtcagggatgtctcagttcccttgcacacatcaggaggaggtgctggaggaggaggcgctttgagagcagggtctcgtgcaccatgagaaacaaactcacccgtccaaacccaaagaatggactcagagacccggagaacagcgaaagtgagacttttaatgccggtcttgcaagatcgagtgtgtggtgggcaggcacactcagcacggccacaacaagcgatttatcccctagtgctcaggcccctctcccagttcctcataggctgagcactatggggtggggcgggggaggtcacagtcttcccggacatcgcctattggttgttgggcagggggccgtaggtgtttttttagggttgtcctgttgcattttgttgcagcccacaatgcactgcaatcctagtcagctcagggggtcttcaggtatttgacttacgacctaagtagctgggcaggctgataagaacagacgaaacgagctattctgcaggatagtaaactttcatcttagactaaacttctttggttggggtggggacaactgagggattgggggaggctgagaagcaggcatttgcgattgaagcaggggcttagtgtatcctgtttcttctgtagtttgctgacctaagctgattcaaggtactttgtcttggaaacggaccatgtatccattatttccttcatccactgagggctgtcttgggttccagcaagtccacgaagctttctgtggcttggtttcttcctttgtgaaataggataacaatggctccaatttcaaaggtgtgttgtgagggttacatgaatgaatggggcaggctagatgtcttagacgtcagggtgggcagatgagggaaatgctaagatgtaaagcgagggcagggcccaggctgggcgtggtggctgacggctgtaatcctagcattttgggaggccacggtgggaggatcgcttgataccaggagtttgagaccagcctgggcaacacagtgagaccctcatctctacaaaaaattttaaaaacttgccaggcatggtggcacatgcctatagtaccagctacttgagagactgaggtgggagaatcgcttgggttgagtggttcaaggttgcagtgagccgtgatcaccccactgcactccagcctgggcaacagagcaagactttctctctctctctctctctctctctctctgtatatatatatatatatatatatatatatatttttttttttttttaataaagttaggaaggaaatgggagaaggcaaaaatgagtggttggcctgggtagtcggccttctcccctctccctgggaggaggaaaaggagaccaggacctgagaagcagccaggcgcctttgatgaagacaccacagaggatggtttagtgaccctcctgggcccaggcagagaccccaaaggcaggcaggcagcaccacttggtgacaactcacaggatggcaggtgctccaagtgctctggaggcacccagcagccaggcctcccctctggtggcccttgttccttggagctccccactgcgtccgcccacacgggagtcccctcagcccgcacacagaagctgccaggctgtacggggcctgtggcacggccagggggagcagtttacgacattaaatttttttcaaaatataaagtctcaagatgctgtcctctaaattcttgtttacctgcaagtgcaactcctagctttatttattgctttcatcagaatgaggaggaagtttcaggtgcgtcctagcgcttctatatccctgaggttattgactagaaatagggaagagcaagcgttttcagctgttttcttttgcctgtggacctatgagctctttccaccactgtctccctctttaaaagacacttttaagtgctctctgatcacattaactcccctccacgcgggttgattgattcaggagctagttgggtcttatttctccttttttttttttttttaagacaaagtcttgctctgtcacccaggctggagtgcaatggcgcaatcttggctcactgcaacctccgcctcccaggttcgagtgattctcgtgcctcagccttccgagtagctaggattacaggcgcccaccaccatgcatggctaatttttatattttagtagagacggggtttcacatgttggccaggctggtctccaactcctgagctcaggtggtccacccgccttggcctccccaagtgctgggattacaggtgtgagccaccgtgccccgcaggtcttttttctctaagccccaagtcacagtggaatcccaggttgaataaattttcgtcatgaggccccactggcctgaagagagtatagggggaaatcaaatttattagaaaacaggatatatgaaaaggggagagagagctagaagcaaaactcacacactcaggtgaaaataaacttttccagtgcattgcaaaatgtaagagtaatctgtcagtcatttcttgaaggaaaaagtagaagtgtttccatgaattagttgcaaccgaagagcaagccattgatttaaggtacaaaaaatatcggcttccaaaaatgaaatgattggccgggtacagtggctgtaatcccaacactaagggaggccgaggcgggaggatctcttgagcctaggaattccagaccagcctgggcaacagggggaaaccccatctctccaaaaaaatacaaaaaattagccaggcatggtggttcacgcctgtggtcccagctactcaggacgctgaggtgggaggatggattgagcccaggaggttgaggctgcagtgagctatgattgcaccattgcacttcagcctgggcaacagactcaaaaataaatagatagatacatacatacatatatacatacataacattttttagtggaattattggtgaaatgcattcataatttgacaagagaaggtcgaattgagcacagcaggctggcagctgtcgtcatgtttcagttcacgcacctggtgctgaggttaccagagcatcccagaggccctgtccttatgaagctcgccctggtagggagggatggtcccctgtggtgggaccgtcactcccataagcaggtttacgagatcgcattgggcacacagaggaaggagccttgacctgtgtctcatgtcagtagcacagtggctctaagctgccttcagcacatccagccaagctctccatagctccaagcctgcaacgatggtgctgtggaattcaggtgagcccttggccttcaggagaccaacactggtctggtcctgttgctttctaggctatcagatctcttgggaagtgtacggcaggaacgactctcgtctcacgcacaccctgaacagcacgacgcacgagtacaagatccaaggcctctcatctctcaccacctacaccatcgacgtggccgctgtgactgccgtgggcactggcctggtgacttcatccaccatttcttctggagtgcccccaggtcagtagaatcgtgtgcggtcctcctgctgtcacctttctcttggagattcccgaggctagaagttgattggcactttggtgtggaagccactgagtgccttgaaaaggagtagtggcctcctgccaagatgctggagggtaaatgggtgttgaccccacttcagccccattctccagagcattccaccacggcctcacgtcccttctgtcttcccctcctgctttggcctcagccagttcccagaacatgcgttgaaagtgtttaaagccagttcccaatgcatatctaaaatgccatgaatactttcaaaacagtagcgatgattgtattagtccattttcatgctgctgataaagacatacccgagactgggccatttacaaaagaaacaggtttaatggacttacagttccgtatggttggggaggcctcacaatcatggcggaaggcaaggaggagcaagtcatgtattacatggatggcagcaggcaaagagagagcccgtgcaaggaaactcccgtttttaaaacccatagatcttgtgagacttattcactatcatgagaacagcacaggaaagacctgcccccatgattcagttacctcccaccaggttcctctcatgacacatgggaaatgtgggagttacaattcaagatgagatttgagtggggacacagccaaaccatatcaatgatgatggtgtgtggtttaattgggtaaaaattggtatatatagcgaccaaggttaacactagaagcacatctgggtgcaagttaccagagttttcctgagatgtcttggacattgtttatccagggcagggaaatgggttagctgacctccggaaggctgtgcttccagaaacactctgacgcacactacgtctggagccacagagtggagtgttagaggggaaactgaggcctggctgctttggccaaacccctgataaccaaggtgcagggaggcactggagttgctgttccgtcattgccaaggctgaacgcttgtagctggagaggggtcttaaagccttacccactcatcctgggtagtggctggaggcaaatcaaatggcgaggactgctttggggacaccatgttctgtttaccgtgcttgaagtttatcgccattaatgattgaagaaccatttaaaaatccagagagctgagaaataggaaagagtccacttgtccttcaatttaaacattttctatttcaaattcattaaaaactagatgtggaaaggacccttgagatcctacagaccctgcccatgccgatactgaattgatcaccaaaatagtttcattgtccctgtgcaagacctggtttcaaacaccccaagcaacagcaaatgaggaaagcattcctcagagatagtgaggtctgaaagctgccctagccttgcatttttcttttctttttcttccccattttatccccttatctttctctagagtattttgcatggcacagtaacacgaaagctctcgttttgaactcataatgctacaattccgggtgggagatgctctttggggagcggcatctgaagggtctctcatctaggagtaggcttgagccacgggcaccctcaacgggaggctcattcagaacccaccttccaccttatccagttgcctgagcaactgaatagaagcagagaaaggagagttctgcacttgcacgagaatttgttcgtcttggaaacgaaatccaagaagcctaaggctcaagacctgatcctgaccgggtgtcacgtcgcctgggagcaggcgatcctgaccgggtgtcacgccgcctgggagcaaccctgggcctatgcactcttccctccatccctccgaggccgcggtaattatgaaaggaagtacggcccgctcgttctctgtgtggtttgaggagccaggaagaattacattcattcatcctttcctcattcagccagcatctgttaattacctacgaagtacagagatgcgtaagacatgacgtgtgcctgcagagtttctcatcagggaggccatgttagcgacgtgtctcccaaagcccactgggtcaccccattaaagcaaaaaccatgcactgatcatgcccctggggaagctgtgctgcttctcaccttcatggttttgagagcaaatccttttttggtatagaatcgttttgaaactgtttacttttgaagctgacacgtttgatacctttcctaagctgtgacggactgtaaatctctccctttcctccctggttcctctctagaccttcctggtgccccatccaacctggtcatttccaacatcagccctcgctccgccacccttcagttccggccaggctatgacgggaaaacgtccatctccaggtggattgttgaggggcaggtacgtgtgtcgttagactgggagctggcatttgcgaagagcagtgttggggcctgtgaatgagtggtacccctgcagatgatggcttggggtgtcggggagatgggtgtgcttggagagggagaaccaggggctggagatagcccagataccagggcagaatgtaggaagacaaagaacaagatgtcaggccggggtcctaccaggtgataagacaaggataagaagggttaaaatgaaagttgtgattcaaaataggtacccaaaattggatagtgtcgttgattgagtttttaaaaattctatatcacaattagctactaaatatactaataggattaattgcttggtacagcttgtgtgtcattagctatgcattcattcaacaatatttttagagacgattgttctatcagcaggcactattctgagcacgggggctattgcagtagacaaagctggctgagtttctgctgtcgaggagaaaagtgctgtctgggaaagaaagacctccagctgtgggaaagctgttatatttgagggacagcgaggagggtgggtgctggagggaggggagcaagccctgcggtggcagggagtgagtctggggagagctgggggcgggttccacaggacttgagagagtggactccgccgagagacttccggtccgactccagctgtgcaagtgctggagcacgcaggggtccgggacagtgccaggcttgaataggatcatgctggcattggtgaagccgtgcaatctgccacttccatgttccaataaaagcaggaggaaaaagataaagggccaaattatgaggagtagtaaagtttcaaaatagttattatctgtagtaaaatccttgtggttttcatgactgtacttatgctatactgcaagacgatccactcctggaaattggccgtaaattagggaacaaatcctatctacctcttcaaaagtttcattaagcaaacatttctgaaagtctaaggaggatcctgaaggcgcaaaccatctggatgggactgacccacaaatggggctggaacaattatttacttaggaaaaatagcagtagagccctacctcacatcatcacacaccagggactgttgtggcgttgagggggtggggagggatagcattgggagatacacctaatgctaaaagacgagttaatgggtgcagcacaccaacatggcacatgtatacatatgtaacaaacctgcacattgtgcacacgtaccctaaaacttaaagtataataataataaaattacaataaaaaaagaaaaaagaaaatcagtcttcagcaaatgaagactaaattgatgaaagcaaactttaaaacgcttaggattaaatataggacaagaatcacaatgtctcatgaaaaccaattctactattaaaatccatctgcagaagtagccaggcaatacttttaggcccgcagaagcacgcgctgtggtctttggtgtctgacgatgccgcatagctgaggccaggaggcagcgctctctgcaggctttagaatgtggtgttacgctagggctaggcaggccacagcgacagaaacgccagcgtcttcagggctcaacatacaaaagctcatctgtgcatccaggcaggcctaggagtggatgacgctcctttggcccatgttccgttgcccagaacttgggcaacgtggccctgtgtcactgcaggagagtctgagagtgttgcatttcagctcatctgggagggaaagacaaggagtgatgtggggaccctcaccacagtttcttggccatagtatcctagctttatgtcatacaacctgtttctttaatttttttttttttgagacagaatcttgctctgtcgccaagctggagtgcagtggcgccttctcagctcactgcaagctcttcctcccaggttcaagtgattccccctgcctcagcctcccgagtagctggggctacaggcacccgccacccacccagccaattttttgtattttagtagagacggggtttcaccatgttagccaggatggtctggatctcctgacctcgtgatccgcctgcctcggcctcccaaatcgctgggattacaggcatgagccaccgcacctgacctgtaaagaggttttacatttttaatgtaaaacatcttaaatatatgcaaaaggaagaatagagtaagccctcttatacccatcagcaaaagtcaatgatcctcaagattttgctgcatccatccatccctggttttttattggcgtattttgaagcatatttcagaccacatgtcacttttcccccatacacatcacacatgtgtctaaaatgcctgttcacatgccaatatggatgaatttcacaggcataatgtttaacaaaaggaaaaccagacccctgcttggagcatatactgtgtgattccatttatagaatgttccaaaacaggaagaagtaatctttggtgttggaataacaggttttcctgggacccttgtggttacttaccgtgggggtgacagtgactgggagggggccacctgaggagggggcgtctggaatggcaggagtgctgtcttttgatctgggtgcttattttgtgtatacaccagtcgtctgtgagcttgcctgtatgtcttacttcagtgaaaactttggccaggcgtgatggctcacacctgtaatccacactttaggagaccaaggcaggcggatcacttgaggttgggagttcgaggccagcctggccaacatgtgaaaccccatctctactaaaaatacaaaaattagccaggcatggtggcgcacgtctgtaatcccagctattcaggaagctgaagcaggagaatcgcttgaacctgggaggcggagtttgcagtgagctgagatcatgccactgtacttcagcctgggcaacagagtgagattctgtctcaaaaaaaaaaaaaaaagaaaagaaaagaaatttttacatgaaaatatggatgtcttttctcatgataccattgtcacacctgataaaattattattatttttttgagatagaatctcactctgtcacccagacaggagtgaagtggtatgatctcggctcactacaacctctgcctcctgggctcaagcaatcctctcatctcagcctcctgagtagctaggaccacaggcgtgtgccaccacaccagctaactttttatatttttggtagagacagggttttgctgtgttgcccaggctggtctcgaactcctgagttcaagcgatctgtcagcctcggcctcccaaagtgctgtgattataggcatgagccaccgcacctggcaatttgaacattttaatatcatctaatagtcagttcacactcagattcccccaaattttccaaaacatctctttacggtggttttgataaaagtaggattcacgcagggttcacactattcattttgttgtcatgtctctcaaattgttaaaaaaaaatgttaacagctttattgagttgcaattgacatacaggtttaaactgcatatatttaagatggacagtttgacagcttttgacttagctacacatatacacacacctgggaagctgtgaccacagatgagataatgaacaggttcctcaccctcaaaggtgtccttgcagcccccactatccctccctaccaaccctccccgtccccacaaccactcatctgcttcctgtcactataggttacagctctgttaatctagtggaatcccccactcttttcccccatgcagttgcctcgttgagaaaacccagccagtcatcccatgggacatctgcattggagatgcacctggttacatccttgtggggtcacttgacctgttcctctaccccgtttgccctgtaaactggaagttcattgcaaagaactggtagattccatttccactcctccctccctccctccctccctccctccctcccttccttcctttttgcctccctcctcccttctttccttcttctctccctcccttctcttgtccctccctccctcctttccttccttccttcctccacccctcccttctttcctccctctctcccttcacttcttccctccctcctttacttcctccctcccttctttacttcctccatccctcccttcctttacttcctgtctccctccctcccttctttcctccctcctttcctctctccctcccttccttcctttcttcctctctcccttcctctctctctctgtctgtctccctccctccctaagactgcttccctgttactacagcagggtgggggcacgtaggtctagtcgccccactcagggatgctaagttgggtggcagagcgtagcagcctgatgcctaccttgtgaatttctccatcagctttttatctaatggtctcatccatccatgatctttgcctgaattaattatgttcttaggatattcaagatgataattttatatttctatcagtctttcctcatttagctgttggaactctaaaaagaagcatctctgctcatccctcagactatttagttactctcaaatgcaggaaggcagaataaatgcttaattcttttcccttaattaccagtttccagggtgaggaattggtcccctggttacttccaatgttaaatagatttttctttctttttctgtcttgtgatctcttttgctgagtatcatcatgaaagcataggttcttacctgttcagtgggtttcagtcacctgcagtcattattctttttgaacctagaattggcctgtctttggcctagggaggctttcgtatcctggggctccggcatgaggctccactctttgatgacttcctgcctcaagctgagatggagccatgcctgcagggccttggtttcatgagtgtcaaatgctgtttaaagacgataacctgagcaccaaggtggatctcctcgctcccagctggtccctgcttcgacaccttcccagtagacagaacatattttctgaagcatcatgagttcatactgacgtttccaatgaaatttcaggttactgaccttaaatgtatatgttatgttacgttatgttatgttatgttatgttatgttatgttatgttatgttatgttatgttatgttgttacttaaatgtatattttattttattttattttatttatttatttatttgagatggagtttcgctcttgtcacccaggctggagtgcaatggcacgatctcactgcaacctccgcctcctgggttcaagtgattctcctgcctcagcctcctgagtagctgggattacaggcgcccgccaccacgcccagctaatttttatatttttagtagagatggggtttcaccatgttggaccaggctggtgtcgaacaccttacctcaagtgatccacctgccttggcctcccaaagtgctgggattacaggtgtgagcccactgcgcccagcctaaatgtatattttaaatatattttcccttactctaagactgtgctttttaggactcctaactcgattatcttctttatcctcctattgtattaagaggttcaacctgtggtctgtgaatttgcctgtgtatcttacttatatgaaaactttatgttaaaacacaaatactattaggagtttcaaaattataatctcagtggtatgactaacagagactactgaatgaaatttaagtatttgtccttaaaatgtgttataccatggaagtgtaatatattcagtttatacctacagtttatattcagtttataatatatttagtttatacttacagtatacaagtacagttgcagtactgttctaaagccactgttcttttctcattgtggttatctcgatacagatttaagtgcgttcatttcaggacttgttttgtttttttgcttcaatttttagcactgactttctttaaaaatcattttacattttttttatttatttattttgagatggagtctcactctgtcaccgaggctggagtgcagtggcgtgatctcagatcactgcaacctccacctcccgggttcaagctattctcctgcctcagcctcctgagtagctgggattacaggtgctcgccaccacgcctggctaatttttgtatttttagtagagatggggtttcaccatgttggccaggctggtcttgaactcctaacctcaagtgatccgcccgcctcagcctcccagagtgctgggattacaggtgtgagccactgcacctagctcattttacattttaaaaaattggtggaggattttaaactaattcttgaggatataactcatttacacgatctcaaagtcaaaactatttaaaaagtgacattcacagaagtttctgttcatttgtctccttaccctgttgcctgtctgccacatagataaccatatttattagacttttggtttttcctttttctttttctttctggcaacataaacagctctgcgtatatgtgtacttcctctttcttccacggaaggtggcatattgcgccttgctgtcttccggtgacagcacatcctgaatacccctgggcatcatgtgtgcacttgtcctttcttctcacacctgcacaggtctgcccggtgtgcatgagctggggtttgtttatgtagctagtcctctgctgacacgcattgggatgtgtattagtattatatcactgccataacaaatcaccaaaaactgagtggctgatacaacatacatgtgtcatcttctagttctgcaggtcagaagtccagcatgggtctcaccagagccatgtttcttccggaagctctggggatgagtcagcttccagggtcattcgggttgcggcagaattcagtccttgcagttgtaggactgaggtccccatactgtgctgtcagccatggtcattcccagctcctggaggtcaccacggtctgtggctcgggatccccttccttcatcttcagagcagccggggcaggtcaagtcctctcagactctggctctttcctcctccttccttctcatctctctggcccactcttcagcctcccacttccacttttaaggactcctgattaccttgtattcacctggataacctccctgatgtaaggttcttacccttaatcacatctgcagagcctctcctgccacataaggcagcgtactcatgggttccaggaattagggtatgggcatctccagggggcctcattcagcctcaagctagttttcagccttttgcatagtcattttgtatttttgccactgtatctttgggggagattcccaggcatgggttggctggatcacaaggcaaatgcacatgtaaacttcccagacattgccaaatccctcttctgcagatggtaacatgttgcattcccagcagcaacatgtatatattttttgccatgcaaaaaaaaaaaaaaaattgaagtctaatttatgactcctttcttgcatgcctctggtttttgaatcataggcagaaaggttttccccactttcaggttctaaaggaacccaaccaattttctggtttcatttttacatttagaactccatccatttggaactggttcttgtatatggagtgaggtatgaatccattttcatcattttgcaaatagctacgtaattgcctcagtgccatttattaaaatgaccattttttttcctgatttgtaacattaaattctcatacgcactttggtctatttctgaacttttcattctgttctattagcctggttattcatgcactaattccacattgtttacttagagaggctttaaactatgctttaatatctggtgaggcctgcttccccataaccaatgtgtgtgcacagacacacacgcgcgcacacacacacacacacacgcattgcttgactttcttaggattttcccggccactcttgtggacatctgatggtgttgaatctttctgttcaggatcatgctacctcttttcacttgtttaaatctacttttctcagctgttttctcttggagaagcactgggctctctaatcctgccttcacctgctctcaaaaaggcaggaaaatgaggggcgatcaatatacctcaaaagctgtaatgtgaagaatacgggctttgagtcagacagacctggttccccccttttttagcacccctgtttcccagctctgtagacgtgcttcttaacttctttgtgagcctgaatttccatctggagaatggggtcagtagtaccatctgcaaggttgtcatgaggattaactcacgtatggctattttaaatgatattttctgcctgtgttgtttgcataggggaacacaattgatttttaaatatttttgtttctttaataaattcttctgtgttctaagtgctttcacaactatgaacacgtttaattctcataatggctctctggtggctgttataaccccgtgtcacagatgagacatcaaggtgttggattacctgccgaggtcacacagccaagccatgaagccggattggagcctgcaaacctcggaagtctgtggctgctcagcctggtgtattggtgttacagccagaaactttgggaattctcttgttagttggttagttttactgtaattttctataaagaattcatatcatctgttaatggcgacagtttttgtttcttcctttgaattttttatattctttctttctcttttttgtttcttcttctttgagtattttgtaatcttactgggagggctaaagcgtcttctatcatatcgaattgggacaatgatagaagacaatctttgttttgtcactctaaagaaattattgtaagattttatcatcaggtatgacatttacaccattgatgtaggctttttaaaaaatatatccagcctgtattgggttaagatgattcttttctgatcctgatttcctaggagttggttttttttttttaaagcataaataaatttaattgcatcagactattttctcatctattgagctgctcatttggtttttctgatttcatctgttggtaaggtggttcacactgcccttctgtttcactattccggagctcctgagacagaagcaatttggtcttgatgtttgttttgtttggggttgagattgttgtatccatgttcataagtgaacttggccttttctggttgtagatttggcctgggttttaagatcgatagtgtattttctcaccagttttcataaacacagtttggattgagcttgtgttccttagccctcaggcagaggactctcgtgggcatctgcacaatgaggtcactcaggcggaggtgagacccttgtgggcatctgcacaatgaggcccctcagagggaggtgagaccctccctcaggtggaggtgagacccttgtgggcatctgcacaatgaggcccctcagatggaggtgagactctccctcaggtggaggtgagaccctccctcaggcggaggtaagaccctctctcaggcggaggtgagaccctccctcaggcggaggtgagaccctccttcaggtggaggtgcgaccctcgtgggcatctgcaggatgaggtctctcaggtggaggtgagaccctccctcaagtggaggtgagaccctcatgggcatctgcacagggtgctcagtgcctcccaatcctgccacacgttgtgggtgtggaggcgcccagaccccgactcagttcatcagaacccctggggcagaggctgcagcactcttccatttgtgaggcttggaaatgacagatctgcatctccgctgagggtcccgcctcagggggcctctgtgctgggccttggaggcaagatgtgctcaggcagcctgtcccgggctgctattctccagcagttcagaggttttagtgctccagggaagaatgaacggggcaagcttcctgccttccccatcgtgggcttgccccttccccaggcctgtgttggttgcacacctccctgggctgtctctgagtgtccagggcagggaagctccgtcacgtggagcccacgtgtgggtgactccctggggctgcctgactcctgggccagctcacagcctgcagccagtggttaaacatttcatgtggaatttccaattcccttgaagggtaatctttccctttgatttcaaaagtgttttagaaactatagacaagccttaagaatcctacagagaattcccctccacccaaaggcctcatccatgatttgcccagttttccccaaaagccctcggtaacaaaaggctccactccaggacatgggctgcacccagtggtctcctgtgatctcagttatttcttgacttctgtgaccttgacaattttgaagactacaggccggttatttccctgattcccctcaatttggatttatcccagtgtctttaggagtcgtcctaggtgacgcatttttggccagaatgtgggggaagtgatgctgggcacctcctgctacaccttgttgggtttgacttggccttggcatgtcccgttgttagtccagttattttgctaacttgactgagatttctcccctctaaaatgaccgccacttctgcaccacccactttacaattaatcagtattttgtgagaagatactttgagattctttaaaaacctcatttctctttccagtctcatccaccagtttgtcatccattaatatttcttgctggaattaattagggcaatgagggcaccagtgattttttaaaaattcaatcatttcttctacatttatccattggcctattcctgaaagcaaaagctttctcctcatttatttttccattaattatcatcagtgtggactcatgactttttattttgggtaacagattttaacccattgctatcattgctaattttgatgctcaaacttccctccatttggcgatttgggggtggcggggagcccatccagctggcttctgtattcttttgatgtctccatcattctttgagcacttccttatcttctggcacaagatgttcccaactcatcttgttctttctctcttctttcccagccatttctccagggaaccttgggttagtgcagtggagagtgggatttagaaaccaagatccaggcagtagtgtgctcattgctactggggcatcactgctcccagctaggaaatgtacatatatctatagctaggtcagtttctatatctagccacacatactgaaaagcattatttcacactatcacctccaaatacaatgcaaaaccctcagtttatgtgagcttcccttttctacatctatccgagcccttctctggctcccagtatgctcagtatatttatttttttgctgaattccactctatgtggccagtcttatgatcaaagtgggctgctgccctgcttggacaccattctgcttggatgccttctttgcccagatcctgacccctgactggactctttcactgctgcccttaaaatttttgcatataaactgaagttatcaaagtctaacatgactgcactatcttctttccaggacttaagtacaggacttaaaaattcctgaagtccagtcaagtcatacttgttatatgtccagcacatcaactctgcctcacttttctatatctacaaaggcaatgatccttactggggcattctgtctcacagtgagtgctggcttagatttctccacatttgccattttcttttcttttcttttttttttttttttttttttgtttgagacagagtctcactctgtcacccaggctggagtgcagcatcaggatctgggctcactgcaacctccacctcccaggttcaaatgattctcatgcctcagcttcctgagtaactgggatgataggcacgtaccaccacacctggctaatttttgtatttttggtagagatggggttttaccatgttggccaggctggtctcaaactcctgacctcaggtgatccacccacctcagcctccaaagtgctaggattacaggcgtgagccactgcaccctgccaacagcaaggtatgcttttaacaatgatgaatgagcaggcatctctttaaacaccttctgagggtgtttcactggcaggccagtgtagataagagctgctgttcagccttctacagactcaagcagaatatactccaaccctctacatcaccagccaacacctttacagctccgtccagggaaagaacagttctgcagccccctcttctcattcttaatgccggaattctggccacacgttcttctggggaactccacactgcttctctccacgtgccaccttcctggccttcatcacattccatggatcatctctgactcatcccccaggaaagacatcgtgacaagcagcgagcagaacaaaaccgtcgggcgtgtagacacaagcagcacaggctttgggatcacagcgacagggcccggaatcccagctccatcactttctagctgtgaggctttagggaagtcttttaggtcatgttctttagccataaagccctaataacagtgcctgtctcacgggtgattgagagaactagaacatggtgttacattgacttctgctttctgtcaagcttgagcaactttacgaatgcatctcctctgagaaacctgccagcccctgaggctgtctgtggctctgtcccagcctccctctgtgctcgcctaccccctgtcccgtggtcctcccaggacgcctggttctcattccccagccacttctctgagaatgtcccatgggctccctggtccaggcaggctccagaggcacccatgaagcccagctgtcctaaactccaggcagcggggcccttgaggctgtgactagtatagatgaggcctctggggcctcctatacctcaccccctttgaatgggatgcaagacaaacccaggccttctctgctgtagggagactccagggctgcctctcacagcctctcacccgggaagcggttgttgactcctagtctgtgcctggccctgggctagaatttggggaggagaaagactccggagcacatggtctagatacaaagtcattaatcacatagaagccagggaggtgatgtcagagaggtctgctggggcgccgggaggacactgaggaaggaacaatagaacccatcagttgggtgtggagggcccaggaaggtcctaacagccaagccccgtctcgaggctctgtgaacgtgagcccaggcggagagcagcagagcagggcagggacgaaagctcccaccacaacactctctgccagaagagtgttcacgtttcttccctttcatctacttttcaattgtatcttctttgcagaaaagtttcctttagatgctaaccatttttaaaagtgcaccaagaaggttttattacttagagttaccttcagtgaattatggaatgaaggatcctaatcattggaggaacccattgaaaggccctataataagttgatgctcagatgtgggttgccaaaaaaaaaagcagcagcttttataggtatttctggctcagtaatgctttgcttaattagtaacctttgactgtagagtgagcaaaacatctctttgagcatttttatggtgcaccataaaagggagaatgcaaatgttatatgttttcatttgccactcctgtttgtctgctcagttacctctgtaaacccctgccattcgcagccatttgctgtgctctaatagccaaaataacgtctagtcttctcaaaagcctgccctgagcagagttttccataatgaagatgctagtggtaacactttaggtacagctaaaactgttttcattctgaaaatggaaagcaaaaaaaaaaaaaaaaaaaaaaaaagtcccacttagtgcttatttgtgcataatagtagccattttcttagaagaaactgttttagaaagtgttatgggctaataaagcacaagtctgtttagtgctggtctctctgtaactaaagagtagtggagatggagcagccgggcgcccaggcgtccccaggacgcttagagacgccgaggctgccggcggcgtcgacagcgacagcgtttggaatgacgcatgcctcggtgaagtcgggggcgtgaagcaacactgtctctctcctaagcacacgctgtgccgagggaccggatcctgggctgatggatgggaggccacgggctgtgtttcattttgctgtttgctgaggcactcacctgcgaggacaccttgcaggatgtatggggctttctgtttctctagcacgtccttggtccaaagcctcttgcgatacacctctcccagaggtgaatcctggggaaaatgtcgtctcagcagatgagtgtatctgctttccctagtcagaagttgaagcccatacaatccgggggcagtcccctttttgcctaaacggccagggtggttttttttgtgttttttgctttttttgagacggactctcattccgttgcccaggctggagtgcagtgatgtgatctcagctcactgcaacctccgccttgtaggttcaagcgattctcctgcctcagcctcccgagtagagtggctgggattacaggcacctgccaccacacccagctaatttttgtatttgtagtagagagggggttttgccatgttgtccaggctggtctcaaactcctgacctcaaatgatccacccacctcggcctcccaaagtgctggtattataggtgtgagccaccgcgcccggcccagccgggggtttgaaagccaaatggattgccctggaattccggggtgggattgcccttccacagaacttgcttctgctctactcacccctccaatccccatgtgctgacattcgctgtggtccagtgctgtgctaggcacaggggcctctgaggaaagtacaaggagaacctgccttcagtgagtaggaaagagagactcaggaaagaagcaagataccaagacctcatggcaggtggccatgcctcagagggagaagcaaaggaccgggacctcagaggaggtttcctttattgttatcaaaccggacttgtggacctccctggcacagcaaagccaaaccattgacatcgggattgcagcgagagaaagtgaggtgtgtctttcagggcaccaggccaggagaatcgggtcactcaagcctaagacctgacctctcctatggcttacagtaaggatccataaaggcagagaggcagaggcttcaggcagagtcaagcatcaggacacggaggtgacacattggttttacctaaaaggacatcttaaagcaggaacccacaggttataggtaaattcaaagattttctgatctgtgatcggttaaggaggtgaagctttgtcgaaacattttggatcagcagaaaagaacgttagctctggcctgagggtgtgacttcctccaggctccttaggaagaaatttagaacaaacagcagaggtcagagttccatcctcagctcctccatatctgaggtcttcctcacctcccccacatctgagctcttcctcagctcccccacatctgagctcttcctcagctcccccacatctgagctcttcctcagctcccccacatctgagctcttcctcagctcccccacatctgagctcttcctcagctcccccatatctgaggtcttcctcagctcccccacatctgagctcttcctcagctcccccatatctgagctcttcctcagctcccccacacctgaggtctatgtgtagcggacctgcatagccaacccatttggtgggagtccgggtttctgaaaaacaactcagggacatatggtaagatgtcactttagtttctattgggaaccaagcatctcctgactctggcttccttggctattgttttcagctactttcaccttcttgtttgtcaagttgctcctttatttatttatttttaatttttatttatttatttatttttttccgagacggagtctcgctctgtctcacaggctggagtgcagtggcgcgatctcagctcactgcaacctccacctcctgggttcaagcgattctgctgcctcagcctcccaagtagctgggattgcaggcactcgccaccacacctggctaattttttgtatttttagtagagatggggtttcgccgtgtgggccaggctggtctcgaacttttgacctcaggtgatctgcccgcttcggcctcccaaagtgctggcattacaggtgtgagccaccacgcccagcctcgctcatttacttctcagggctagctaggtgcctggaatttcccttgaaggaactcaagatttttctttatttccatgtttgggggcccaccagtccctaagaggggttcctgctccatctcattatgaggatcttccttggaaaataggcagtgtggacatgtgggtagaaacctgtcctgaaatgtagctgtaaagcgtccactttcctgtgcatgtcttctctgtgatttgctttcctctcttcaaaagtccacagtgtttataagcacatcaggcaatgtcaaggcttagaaatcccagagtctcctggaataagacactcagatcccctcactctacctttactgctgccagcattccgtctggaaccaggcctggctgtggcagggcagagccagctctgggacctgcatggatttgtgtggccacaggcaaggccaggggaaggtgaagttattacctggtaaaaccagcagaagagaggaactttaggcaccttagcaacgagccaccctcccggcaatggttgttaggggtgtgggggatggtcactgagagctggctggttggcagaggatggagaacagaggctaggggccaactataccgggatgggtcgtgggacctctgtaagcctcagtttcttcatcataaaattcagagaccagaagttcatttaacgctttagcatgggactagcacatattagacatttaataaatggaagttcctaataataaaaataatgaagttaaggcaagtgtttagcatccaagaaggctgcttgagacactgtgaccttcagaggaaagacctccttccccagagggaggcctgtggagtgtgcagggccctgtcctagaaaatacctgggaaaccaagcagaggccagcagggcaggttcaggcaagatgagcgccacataggagctgagattcaggggccggggacactgaaacccccacgggggtcgctgtggtcagagaacccaggtctgcgaagtccccagtgactgtaaggatctgtagcccaggaagaggcagcctgggctcaaacacccacagtggcagtggagagtcaggctggagctactcacagtgcactcgagcagaatcacaaactcgcacagcttgaaaatggcaaatgcagcagtccccagctctttttcccggtagaaactgactttaggaacagcaaggaggcttctcacccagcacactggttcccaggcttcacccagctgggcagagggtcaggagcagcccatctctgcagaggcattggcctgttcctgccccaccccacctcgcagcaaacaaagatggcaagacggcctgggccgactctgggtgaggggctcacctgggtcaggaagcagacagctcctgtacggccaggggctctcaggttgctgtgtttggtacagtaacgtcctgtatttattttttatgtggttaccatctttgtcctcccaggaacacaagctcagtgagagcagggactttgtctgagcagtgccgcatctccccttggcacccagaacagggcctgctgcatagaaggaaggcgtcatgccaggaagcgcctgtgagcaggtggacagggcatcgcacacatgccatccgggacagacatagccccagacagatatattgggccgcccaaggcccaataaagtttccaaccttgattgacttcactgtccacctggccacctgttacctctgtagggagaaattctagtgtgcccgtctcctgcaggttcataagccaaatgcttttatctcatcacttcaagatctggggctggggatttctcatcactacttctgtctcctccttccctccttatggaaggacgtgagacctgtctgtggccctttggataagtatctgtcagcatttcggtcataataaaccctgactgtagttgaatttctttttcataataggaggaacaagagtgacattatctctgaatagtcattcgcacatgcacaggagagctgtcattggccctaatgactccttccataatcccacggtcatctggtaaatttgccgaaacgggcctcattttttgttctggtgtaatgtctctgcctaagcgtttaggtgctggggagacaggtgacaatgacatacatactcagaaatctcagaatgtttcttggttgctcgactgtccataataacaccctcacagtggcttttctctcttatttctcaaccagcatacaaaatctatatgagatgaatggtggaaaaggggcctttttgttcattcatctgtcagatccgttgaggtcctattatgggacctttaaaactaccacaggagaggaaaatactgccgcatacgtgacaactcaagtgggaccaaaggaagtgttttaccacaaatgtcattttcgaaaaatagaggtcaacgtatatataaatcacaaccgtcaaaccaaattaaattttatgagactcatatttccccgttctttccgaggaccattccctgctccgattccttcatcctaattctcttgttggatttttttagatttgcctgtgtgtttcatttttccagccattaggttttatatttctttccttcattcgcccattcacccagcagacacttattaagcacctactgttttatagattttattgttccaggtatcgtgctacagattagattactaaggtcaaaaccttttagtttctccctccgagaattcacaattttcaggaggagggatgtgagagggaggatggaaatgtactcggttttttcttttttttgttttgagatagggtctcgctctgtcacccaggctggagtgcagtggcacaatcttggctcactgcagcctcaacctcccaagctcaagcaattctcccacctcagcctcccgagtagctgggattacaggagcacaccacaatgcccttttttttttttttttttttttttttttggcagagatggggtctccctatgtggccctggctggtctcaaattcctgagctcaagcgatcctcctgccccagcctcccaaagtgctgggattacaggtgtgagctactgtgcccggccacaaatgtagtctaaattttggtacacatgagagtcgtgagaattgttgtaatgatctatggccaggggagtatgtgaaagcaaatgagtgagcagggtcagccaggaaggctctgcagaggaggtgagactcaggttggaccttgaaggggacacagtctttcgatgggagggaagacattccaggcacagagaagagaggaatgaaaggctcagggttagaaagttgcacagcacctgtcgttttaaagtatagatcttatttttattcgggaacggtgatgccaacagatcgagagacaaatggcattggaaagacagtttgttgctgacagatcccaaggggagggggcagggaatgccacacagggccatgtgcagaagcaccgggtgggtcaggaggcagaggaggaggggactgtggcaggagcctctgctgtggcttctgagggaagggccgggccaggcaaggttaggactgcctggtgtcacagtctcagcgggctccggggctgggggctgttcctgctgtcagatgcccagccccagtgacaggacagaggcatgaagccctgagtgtgagcgctcacagaggatgaggtgggactgggctctaggtacaaaaggtactacctccaggtgagctgcttgctgtctctgggaactggctcaccctgggagggccatctctccagggccagccaggcccaggtgtgccaggtccagtggaagtggtggctaatgcaccgtgggcagggccaagcaggcacagagtggggcgtgtgtgagcgggatgtgatgggagatggcccaaggggagccgcagctggtgggaaaggccatgcttgggggctggcttgtttttatctaaaagcacccctaagaaaccgtggctgctggtcaccgagctcgctggcatgtgccggagtgtccggggctgacctcgtcccactgggggctcttgacagccctttagggtgaccactgtggtcctcgctatgtggacaggaagtctcaggagctcagtgtctctcgaacgtaggcccagccaggcctcatgccccagagattttggccgaggagccactgctgctctcctcacgccccttcctgggcaacggagcagaagtcctcaccagcgtttcaggaatttagaaatattagcagggaatcacccaacatgtggcacagggagtgtcaacgtccctgtttccccttgagagggatcagatctgatgggagggagggacagatgcggatggggaggttgcaggactcagctcagacacggccctgggctcctagggcaggggccatggggggcagacatggcctccaggagaagggctttatgaaggagctggttccttcagggcatggggttgagcgggaaggctgtttcgggggacacacttgggagatgtgaacaaactggccagaatgcagagagcacagggggagctaaggcaggcaccaggcgctgtggactgagcgtgcccccaattcctgtgctgaaatcctcacccccaaggcgagggtgtcagcaggcctttaggaggggatggggtcatggggtggagccctcaccaatgcgatgagtgcccctctccttccaccacgtgaggacacaggggcatttggccatccccagcctggaagggagtcctcaccaggacccacccaggctgaccccctggtcccttcagtcccagcgctgtgaggaaatgaactcccattgcttgtaaaccacccagtctgtggagtgtcatcacagtcgcctagtggggaaggtggtgtaggagggcaccaggcacccctgggcctggagagggaggctggaccgctcggcacagcaagagccgtgaattggagtcgggtgagatggatgagctgggggcctgtgggttaacaaggaccccagactcatctgcccctccttccctgtggctgtgagccccaaggtccacaacaccctgaggcctgccccaggctgaaccctgcagggtgcgtgacgggggaagggaggcctatgcggaggtgcacacaggggtctcctttaggccagtgctctccgcactggttgccagagaggccgccttgcctgggccccgaaaaccaacagctgggcagccctgaccctttggtttgtttgttttaaggtagcaaggacacttgcatttttttttttttttttgagacggagtctcgctctgtcacccaggctggagtgcagtggtgcgatctcggcaagctccgcctcccgggttcacaccattctcctgcctcagcctcctgaatagctgggactacaggtgcccgccaccacaccacgcccggctaattttttgtgtttttagtagagacgggagtttcaccgtgttagccaggatggtctcgatctcctgacctcatgatccacccgccttggcctcccaaagtgctgggattacaggcgtgagccaccgcacccggcggaaaaatttgcattttttaaaactcaccgatctgtcaaaatagttcaagcaagaggttgggagcttctacatcagggtcctaccactgaaatcaagcaaatgtaagagaggctgtggaggagaccccaccatgtgcagcaggggaggggtgacagaaggagcactgaccctcgatgacagaggacgatggtgtcgtgaccagaaatagagccttccacaggcggagcccgtcttgggaggaagatcgcggttctggggtgaggctgtcacatgtgagctgctggaccccagaagcgtctgcctgtggtcggtaggaaggaggtcccgcacccaggtctctgtctccttgtggagggacaggaagggccctaggaaggaagccatgcaagagagaagaaagaggaggcaaggacacactcaggagggtcagagaaagggccagatggggagtggagggagatcgagagagccagcaccccaggaacccaagcatggagctcaggatcagggaacaaagcccatcactccacagcccttctgcctctgaagatccaaagaatattaaacaggaaagacaaaacaaacgacaacccggaaagacagaagtccccagggaagggctgggaatctagagctgggctgattcaaagcctgaagcttccttgggagtgaagataaacgcagcacagcgtcgagtcccctgccggcttatgaggtgtgcaaactctgcgatttgtttgagggaactggcctctgggccttcctggtttcctgtgcctttaccagaagcccccatctgtccctccctctgcaggggccctccagccacctcctctcaggaggtttcatttggctgtggtgggcacggggaggagccgtcagaagcaggggtactcagtgtctgtggaagttgctagacgtgcaagttttcctgctgacaccagagtttcagccaggcagggtgcgcttggcttggcagctttccatggaaggggttctggagcatctttttctcctcctcttagctctggatggaggggggccacctcctcacgtccctcctcccttccccacacgcagctgcaccttgtctgcttcctctccatgtgcagaattacctttgggatgaggttaatgactctcctctgagcagccattgaccctggcctccggagtgctgagctcaccatggccaccagagcctcccagcaggggtgttcctggtcctgccctgcccaccagtttccaccagtttttccagaggccggatctcatgtgcacaaacagaccaagcctcctggcccactggcgccaaaccccggccagacctgggagtgggcaagctggggctgcgtggcgggcggcagcatccccgtgggtataacagacagacagctcccctaatgggcctgaaggaccgcccctaccgggtggcatttgaaatagatgccatttctgcctttgtccgaaatatcataaagtactgtttattagccttaaaaaaagttaaaaaaaaaaaaaaaaaaaaaagccgttcaaaatcccggcttccccacagagcttttttttttggagacagagtctcactctgtcacccaggctggagtgtagtggtgcgatctcggctcactgcaagctccgcctgccgggctcacgccattctcctgcctcagcctccagagtagctgggactacaggcgcccgccaccacgtccagagaattttttgtatttttagtggagactgggtttcaccatgttagccaggatggtctcaatctcctgaccttgtgatccaccttcttcggcctcccaaagtgctgggattacaggcgtgagccaccgcgcccggccccccacagagctttgatttgttttatctttaaagaattctgcctccctctacatcagcacattgttagtgagcacccagttgcttctagaacattctttcttggccttgaaatctaactagagagccagaggagcccagccagggttaaagaactcctgtctctcacgaaaaaagagtcctggtctctccagacaaaaatgtaaaccttttattatagaaatttcagtttctcccctagaggtcgctaagtgtagttacatttttggtgatcatctgttttggagctccgtgtaaagcaacccattttcagtactgatttttaaatcattcgcatgttcatttgtaaattcgttaatgcattaaacaccaagttgaggctggaccctgggagagatgctggaggtgcagggatgcgtgagaccctgaccttgcctcagggcaagtccacaagcagccagaagtgatgacacatgtggtgagaggactcagcagccgaggaggagtcagtgccgtgggggtggtgcgctccagcagggcttgccacactttctgtaaaggtcccgatagtgaatacttgaggctttccaggtcagacgctctcagttccagctccgcagttcggctgcaaaagcatgaaagtggccagcagccgcacaaaccagtgacagtggctgtgttccaataaaactttatttacaaaaacaggaagtgggccagattcggcccctgggccggagtttgctgactgcagtactagagccctgcttgtttgtgtttgagacggggtctccctctgtggcccatgctggagtgcagttgcataatcaccactcactgcagcctagaccctcagagctcaagcgatcctcctgcctcagcctccagagtagctgggactacaggcatgcaccaccacacctagctagattttgtatgttttatagagaatggggtctcaccacgttgcccaggctggtctcgaagtcctggactcaagcaaacctcccgctttggcctcctacagtgctgggattataggcgtgagccactgaacctggcctagagcctgctttaataaacctgctaggggccatcacgttaaagaaggtaattgtgtttgacttactgtttgttgatttggcccagactctgtgaagttggatgctacctcatagaagattgtaagttgcaaagccagaggtcacggttatattgctctcatagctggttttatttctaactttttgatcttattgagcattctttctttcattcactctacatactttgacatatattcccctccgaaccagttttaccatcttactagttcctcattaatgagtgaaataaatctttgacacacactatatatttgtatgagaatttgtatgcatgtatgtatttatttatttatttttgaggcagggtctcactctgtcatccaggctggagtgcagtggtgtgatcatagctactgcagccttgacatcctgggcgctaatgatccccctgcatcagcctcctgagtagctggaactatgggctgtgccaccatgcctggctaattttttttttaattattttgtagagatggggtctccctctgttgcccaggctgattttgaactcctgggctcaagagatcctcctgccatgtctcccaggagctgtgtttttatttatttatttattcttttgagatgaagtcgcactctgtcaccctggctggtgtggagaggcacaatctcagctcacagcaacctccacctcccaagttcaagcaattctcctgcctcagcctcccaagtagctgggattacaggcatgtgccaccatgcccagctaatttttgtatttttagcagagacggggtttcaccatgttagccaggctgatcttgaactcctgacctccggtgatccacttgccttggtctcccaaagtgctgggattacaggtgtgagccaccgcgcctggccaggagttatattttttgttttttgtttgttcgtttgtttgttttagatggaccttcactctgtcgccaggctggagtgcagtggcatgatctcagctcactgcatcctccacccccctggttcaagcgattctcctgcctcagcctcgtgagtagctgggactacaggcacgtgccaccacacccagccaatttttgtatttttagtagagatggggtttcaccatgttggccaggctggtcttgatctcttgacctcgtgatccacccacctcagcctcccaaagtgctgggattacaggcgtgagccaccacgcctggcctgggagttgtgtttttaaatgaatgctttgacagtgatctgcactgtgctgggggtactctgaagagggtataggagtacagaattaggacatagattctggcagcctggcaggggcagtgagaggctaagagggatgctgttcagaggcttccgaaaggcccggatgctctccagattccaaaggagtcagccagttgcagagaggaggggtggaaggagcagacacactctgagagggggaagagtggtgcagggggacaggtgttggagactgcgtgatgcctccaggtaatgacaaaccgcggctgcaggaggaagtgcaggcagagcctaatggagccatgtggcacctgcctgggttccccaatcatttggcacctgttccaatcgacatctttcaaaaagggagaccaggcactgggcgggaagggcagggtagtttgaccttggctgccaccttcagtggtccacccttttcccaatccattgatcctggccctgaaactgttttatgctcagcaaaacaacagccctgtagataaccagacactcgctgctcagaaggcaggtgagggggtcatctcatggagaatggccacagggcctagcaatggctccctcctcaggctctcctggtgggaaaggatgaagtgaagtggagatcagccgccccactgtcccccgtttcttttttttctttcttttttttttttttgagacggagcctcattctgtcacccagcctggagtgcagtggcatgatctcagctcactgtaagctctgcctcctgggttcatgccattctcctgcctcagcctcccaagtagctgggtctacaggcacccaccaccacgccttttttgtatttttaggaaagacagggtttcaccatgttggccaggatggtctcaatctcctgaccttgtgatccacccacctcgacctcccaaagtgctgggattacaggcgtgagccaccgcgcccggccagcccccgtttgtgaccgtgcagtggtttcccagcatctctgcagagggagccgcacgcccggcgttctcagagaaacccgatgagcctggctgcctcttgctgtgctttcccccactctcctgctctctcaacgcggcgcgtgcctttctctcccgggcagcctcccgggccttactggttctctttcgttcctcttggtcgtgggggtggaacagccctgaatcccagagctactgccctgaccaccgctgaccccgcagcagcccctgtggctgagagcctgccctgagtgcccagtgcctgaacaagatgagggagcccacagggtcaggaagcccccaggcctcaggtgaatgcttctggggccaggaaagcagccagacagactgaatccatacatgccgagcatccaggccagaggagggcagggagctctaggcagagcccccgcccaggaccccagcgttcctcagtcttgtttatttctccctcaggcagccgaatacacacatccagggtggggagggtggggagggtggggagggtggggagggtggggagggtggggctgcaggggccaaccagaggaaggagacctggagtcgcttagcaaaggtgaatgagcgtccgcagtgcagcttggggtcttgagagtaagttgaacccgccaggcgtctgtttccccctcacacatgcacagaccaggcaaggacccggaaggcaggaggctgccgggaaaagcgcccaccggtcacttggcaccgtgagctacgcacgtgagccacgtgcgccctgactgctggctctttccttagtgcttatacgtgattgataaaaggtgctaaattgacggcctgaaatggaagtcatccctttttcttcctttcttcttcttttttttttaaacaaacaaaacgtattctccatgaaatcgcccagtgctttggtttaacacccagaggactggtttcactaagaggagcccacctaagtcaccgaggactctgaaaccgctaaaccatgccacagggccagcattcaacacggaggcactttgcacccagtaaaatccaactgaaaaaatgtggggcttggtcctccgcactccccagtatctggtcccagcccgcctacgacccccatctcctcccctgagacattgcccaggcagccgggggcctcccacggaagcctgagcagctcgtcttgcttgcccttccctctgtgctgtggtgcgtgttctccattacctggaggcctgtaaggtgtcgtgagctgtgccgatgtgtgacaaacatttggtgaccttgaatgaatcactctttttctgggcctcagcttctttcagcgtaacataggctggaataatatcctccggcttcctagcttatgggtgggcccatttatgcatcagctgcatagataaatatcgcacggctcctctccactagacactgtgccggggccagagctttcaagccaacctgagtgagctcctctgagatccccggatcgtgaagttcattctctttttgcccatcaggattggatggttccagtctcagcattgtgctcctgggtcctttccctcttcacagacgcgatggaggaaggcagctgccatgggccctgatgggggatagggaggcctcagtcctgtctgactcaagagctagtccaaccccaggttcgcctagacccttcccttctccaagatgagtgttctgtggaaccttaatctatccacataactcttgttttctgtgtctctgaagtgaggatttgagggtttcgatggctaccccagtgctgagaactggctcactttggctgaagtgaggatatgagggttttgatgtctaccccagtgctgagaactggctcactttggtgccaggggacttgccccctttgcctctggctgtgcaagctgcacagtcttttcctaattacaccaccctgtggttttgccgacttccggggtattcattatctacgctgacctccagctcgttctctaccaaatattttggccggtcattctacatttcattttattgtttctttttttcgttgaggtgaaattcacctcacataaaattaaccattttaaagaataccattcacaacttagtagattcccagtgctgtgcaaccaccacatctgtctagttccaaaacatttttatcatgccacaaagagacctcatacccaatagcagtcacttcccatcccctcctctccccatcccctggcaaccaccaacctgcgttctgtctcaatggatggaaagatcctggacatttcgtaaactggaatcgtgcggtgcatggaccttgggtcaggcttgcttagctttccatcagtcatgttttgagatttgtccatgtggtagcaggtgtgggtgctttgttcctttctatggctgaatcctgttccatggtgcagagtccttttgtttatccactcagtgctgggcgtttgccttgttcacggctttgactgtcgtgactagtgcactaggagcatgtgcctgcaggtatctgttaagacacctgttgtctgttctcttgggtcagtggctgggggcggagttgctggcttatgcggtgactgtgtgtagcttttggaggagccactgaccatgtggatgttttcagctgaaagcgttgagagttttgcgctttgcctttcgagttctctaggaagcaagccaccagcatgcctgcttacacagtctcctctgcatccgtgtcgccagtttaccaaggtcattttgaattctcctgccaccctcccaagacttagccacccaccaccttggtttcctctgcacacttagtgagcacgtttcctatcctgtcatttaagccacttacgaagtgttaaatgcaccaggccccaggccaatcccactccagcagccagtttgtcctgacatgctctccatgcttgcagccggccttctctgtgtcccttgggtcccccagagccacacggccacacgaaaccagagtttgcttgtgatggggctgcagagatctccaaagatgagctccagggctctcctggtgggcacaaggccgtggctgtctctcccgtggctccctagctggcgcagcttgtgtggcaccatcaagggggagagagggacgtggtcagcttggggcagtggcagtagaagcggcactggcactcgggtttcttaagagcacaaggatgagtgagaggtggggctcggggtcagattaggggaaatgaaaatgctactgagcagggagatggtgtggagctcccagacagggagtaaaattagcacgagacagaccatggggcaggagcaaagactcgggagaggaagaagctggggaacttggagggcaccctgcaggcatcgccagcagacccggaaaaggcaagtctctgttgaagggagtggctcttccctcgtcaacactgccaggaggcagtttctttaaatcttaaggggactgggcctgccgatctggcttccagggcagaagactcatccttccctgcctaaggaccttccttatgccgtgggccagcaatggtgtctgtttggtgtgtgtttggggcagaaagggttggggtcgaagctggacccccagcctgtgcccacagctctgtcactgcttaccatggtcctggccaagtcttcctctctaggctttctctgagccctcacttgtcaaacaggaggaaggatgagatggtatggaaggtcccctccatcactgatggcctccaagccctcagaggtttgttcccaggggtttcactgtttgggtccagtccttctgtggcccagttcttgactgtgagcttttgactaaaactcacccagacttgatggtgggcatagcaagagcctgtatctccaaggcacaagagggggttgtgcaggactcaacttgtcccaggtgtggggacgccttgcagccctgcccagctcaccaggtaccagcaggtgcacatggtctacatggcagcctcagtccctaaggcatgtccagcccatctcagtgtctccctctgcacaggtgggagctatcggcgacgaggaggagtgggtcaccctctatgaagaggagaatgagcctgatgcccagatgctggagatcccaaacctcacaccctacactcactacaggtgagaacagcagtgataagctgttacaggaggaaacactggcagcccaggcaggtgccttctgttggcaatagtaaaacccagtcgtacgtatgcaaatcagatgtttcctagtggcaataacagtacctaaaagccttaaggagcaggcgggatgcatagcttggtgttattccaagggagatgataggcagatgttagactcatgaggctccttctatcagtaccagctggcaaaacaccccatagaaatggcccactgttattatattaggctgaataaccaagaaccacaggcagcagagatgtggcactttaccaaactccacaacctgttgggactattaacgtgccgtgtgcaaacaaagcagatgtcctaggaagatccttctgctccccttcccaagcagggcccaggagctgctagtctcacttatcaagcaattaacatgccatttaacctttagcttcttgaaccccgaaactgatccgggcagtaaatccttggctttaacaaagggtagggtgattatgagctgttagtactgtgatcacttcccgtaaggcctttgaaggagatggaatttccagttatcaccagatgttgagtttgataatgtcattgttctgccaggatggaacatttcatacgattggagaatgaaagaataggaattagtaattcagggactaaaaggtgaaattacatctttatgaagaatttttctttccggcacaaaaccaaagttagagttaaaaaaaaaaaacaatgagagatgctatttagcttctattcattttaacatccttcaggagcttagaacagacaaatcaggacacaatacactgggttttaaagaaaaacatttagcttaaaatgagctgttgggattcaagacttaccatgtgaaattaactgaagctatatagttatttcaaagaacagaaactgtaagtagagatcagtgtccctgtctgaaactcaggtacatttggggaaacctctatagtaaatgtatatgtgcatacttgggatatttttctagtatgtaaattgaattcaaataattgtttatgtatgtgtaaagaagagacagaactgaaagcattcctgtagattttagagaacattgaactccaccttcattttatagttaaggaaacggagatcatctgatttgctgtaagtctcacagttactcactggatggaatcacagagtgtggtgtgagcggatagaggcctcagttacctgacaaagtttattctgccaaggttgaggatgcacccgtgacccagcatcaggagatcctggcaacatgtgcccaaggtggtcagggcacagcttgcttttatacattttagggagacatgagacatcaatcaatatatgcaaggtgaacattggttcagtctggaaaggcaggaaagcttgaagcaaaggcaggaagactccaagcagggagggggcttgcaggtcacagataggtgagagacaaagggtcccattcttctgagtttctgatgagcctttccaaaggaggccatcagatctgcattgatctcagtgagcagagggatgactttgaagagaatgagaagcaggtttgccctaacgcagcttgcgttttccttgtagcttagtgatttggggttcaagatattttcctttcacccctcattcttctcctgaaccaacagaagaagagatgcagagtgccgttgatcatttaaaaggctggacttcaaaactgccctttggtagtgacatcctgatattccaattctgtcccatagctacttgcactttaacccctcgaggttatcctaaacttgaatcagggcaactgatgacatcaatttctggacacccaatccatccaactagatttcacttgcaaatttaaaattgttgagttgcaactgatgtacctgtacctttctttgaagtcttttaggggaaaaagggcacatatgcaatttgcattttttttttttctgaggcagagtctcgctctgtcacctaggctggagtgcagtgacaccatctcagctcatgcaacctctgcttccctggttcaagccattctcctgcatcagcctcttgagtagctgggattccaggcacccgccaccacgcctggctaatttttgtatttttagtagagacgagatttcgccatgttggccaggctgatctggaactcttcacctcaggtgatcccccgctgcctcctgcctcagcctccctaagtgctgggatttgatcccccgccaccgcctgccttggcctcccttagtgctaggattacaggtgtgagccaccacacctggccacaatttgcacttttaatgaaaccaggtgaaaagagggtgtccttgagcaatagcctttatgatatgagtagacacctatctgagccctcccttgagaaacagtcagcgcctttgtggtttcgttcttttccttcttacctttgctttgccgtgactctcatcagtggtttttcctttagatttcgaatgaagcaagtgaacattgttgggccgagcccctacagtccgtcttcccgggtcatccagaccctgcaggccccacccgacgtggctccaaccagcgtcacggtccgtactgccagtgagaccagcctgcggcttcgctgggtggtgagtgggggtgagaagggaggctggaggcacacgggtcctgagtgagccagggcacacactaatccagggcttaggagtttcttagtcacgcctttgtcctagtcaaaactaatctcatcgtcaaaccaaaaagtattgcattttacaattagtgttggatctcaggccagcccaggagatctgattaattagtagcattactcactctcttcttggaactgaggaatattccttggggcaggaaagctgggggtgcctcacaccagaactctaagtccttaagctaggtcaacatggaaccaatactcaatatttgtaagagagccagcctgatatttaatcagaacatttgcccacaaaattaagccaaaatgtattaaaagaaattatatgcagccaaagttactgacagggtttcatttaattcacagaacaaaagtttcagggaagaataaagtagatccttctaagactatttcccccaggaacacctcctccacggagttggcctcacagggcaggcccatcccttacaacccgtgagggtggcagttctgagatgtcagctcatcgcgactcctcgttccttcctagcccctgccggattctcagtacaacgggaaccccgagtccgtgggctacaggattaagtactggcgctcagacctccagtcctcagcagtggcccaagtcgtcagtgaccggctggagagagaattcaccatcgaggagctggaggagtggatggaatacgagctgcagatgcaggccttcaacgccgtcggggctgggccgtggagcgaggtggtgcggggccggacgcgggagtcaggtgaggggaaggcgattcccatcctggagacaccgcattagagatggggctgagtgcccctgagcctccagatcccaggctagtggcgtctcattggcctgtcccacttgtgtctgtcttggagctttcctaatcccgggtttggccagactcggcaggaatttctgtctgatttcattagggccccaagccattcattggaaactggtgatgatttccaacaggggatcgactcacattactgttttctaaattagggataattttcgctaacgatgaaaagcaagaatgtgtaaagttcctatggggaatctttaaaatacaaggtattcaggaccttcttgtcacaaattaatagacgtagtatgttaagtaatctagcctgtggtaataaataggcctctaaaagtttaattgcttgaacataataggagtttacttctcactcatattgtggtctaaggtgggcgttcctgtttggcgggtggctctcttccacaaggtgattcagggacccaggctttaccgttctgtgggactaatctccttctgcacccagctgccagcagggaaaagaaggcaaagaatggacctcttcagacctgttcaggagtggaacgtcactctgttcatcttcttggggctcagtcatggggctctgccagttgccaggaagcaatggagcagtgtttttggccaaccttgagcagacctctgctgccctgtgctaatgctgaaagtggctgcctaatcttctgggctttgtggactaacttccgctggccaactgtgggtcataggagcttttcttgcccccctccttaaatttttagaaacccaaaggaaggacggcaattaacgctcatgaaggactcactgtcacctgaccccggtcccttcagtctgatctgaattagtgaggttctgtctggagaaggaatgaaccagctgcacctctgccccaggcttcttggatgagagtcacagcttgtgcttgacagatggaggggctgttcattctggactaacctaggctgttagaaatacaacttaaattcctgacctttgtccagacatgggatgaggaggaggtatgaagggttgagatggtgaactgggtcagtggccagaggaaaagaacaagactcccccactccttcccccagggagcctagatccattttgcttattgatgtcaaaccctcttattcgctctcttttgcttctcttctctgactctctgcgttaatgagaatatttggctccattgtttttgctgtcgtagacatggctctgtttcctggagacagctcctgagcccagcatgagtcctcctttccttggggctcccagggcacagaatcgctcttgaagctggggagtcaagagatggccagggcctgcccacagctgtttccaccccagagtcctcggaaatgccccggatctgccctctctgcaacccagagcctccctgcttctgtccctgtactacaatgccgtgcaaagagacagtccccctgttgttgttttcagtagaaaaattaattaacttgctagatgctggaaactgccttaggagacacagttggaactcagagtgactttgatgggaaatggacagaaagatgagctaggaagccaagtgcgtgacgggtatcagagaaaacctcgcacagtcagcaggaggaggcggatgacgtgggggcacaaggcctgttggcatgggtggaggtggctttggggggctgccatcctcaggacagaggagtttaaaagggaggaaagcatagacacttggggggcccagggctcccgggcctggcctgtctgctctaaagatgaagagggaaacatagaaggtggtgccgaggtgggagggcagcctctgaggacagctggagtgaggacgcagatcagctcccagcaataaggaaaggggacttggagccctgggcggtgccaccccctcacctcttcctaatgctcatcttatccgtgccaggtgctgcaatgggtgcaggtattcccaacaccacccctccaccctcgagacagccaggccggggtgaggagtctgcaccctgggcttgggtccagcagcgcccagcacaccgagggcaccagcacgtgcccagtgcatctgcacgtgccacccgctctgtgtgccacagcgtggaagggcctgggaagctctggataaaggctcctctcatcctttcttgctcattccccgggtcccgttggtgacaggtctgaacctgccgccacccttgtaggttactgtaatgcacagtgggttgcaatgcacagaagccccctgggtttcctcaatgctggttaactttcagccaccagcaccaagccaaagctcctgtgccactttgtggctttatttcttcctactcttctcagagggcaggaggtgagggtagacaggaggactcttaagcagtagcagggagaagcagaaccatggccttgtgggaatgctgttagggcgtggcgtgaaccctggagcccaccaatgagagccccggaagagcagccgtggtgacaaccagtgtgcttctgagaggaccagtgtttcaggatggaactgcccaagcagcagggctgggcccagtgtccctcggctctccttcagactgaagctttcattacgttccaaaggaaaggtggagacgcacccacatgcagcctgggattgtggtcacgtggatttcaaaaatctctgttatcttcactgtctgaatctttgtgacaaaggagagaacttgagaagttcagagggacagttctaaatccagtaaaaggcaggccaagaaaatagtttttcagaattaaaacttctgccataaccaacaaaaacttatggataaaatataactttctggaatcttaaatgtattggccaggcagggtcctcacacctgtaatcccagcactttgggaagctgagtctggaggatagcttgagtccaggagttcaagaccagcctaggcaacatagtgagaccccatctctacaaaaaatacaaaaattagccaggtgtggtggcatgcacctgtagccccagctccttgggaggctgaggcaggaagatggcttgggcctgggagtttgaggctgcactgagctatgatcgcaccactgcattccagcctggccaacggagcaggttattatgcctctaaaaaataagtaaataaatgaattcatcaacacactcataagaaaaacagggaaatcctcaggtgtcagaggcataacaggaactagaaagagttcagcaggaagtgctgggctggtgccgcagctgccctgggtgggataggatcaggttggatctttcctggtggtttcaggacctggggtaaggagtctgcaccctggtcctgggcccagcagtgcccagcacactgtgggcaccagcacgcatccagtgtgtctgcaggtgccaccgggaactgtagatacactgggcaggccatgcagtaacatgagagtcagctttgaatctgtgtaagggaagagttagggcctaaactcctgcagttgagacacggctcttgaaggcctttccctccttcctaggagaggctgaaactctgcctgcagaggtttgactgtatgtctacctggactctgagtagagaatgaaaagtcagtctgagccctgtgcccagctcaggactgggttttgaatttgcattatatggatggcccaggaactcccagaacagaaattaatgtaacatttggttccagaaaccaaaagcacgagcaactaaagaaaaagtagatacattagacctcatcagaatgaaaacctttatgcttcaaagaatgtcataaaggaaatgaaaaaaactccccaaatggaagaaaatatttgcaaattatgtatctcatgagggatttatatctagaatatataaagacttcacaacaaaaagacaaatgacccagttaaaaactgggcaaaggatcggcatagacattcctcccaaggagatttacaaatggccaccaagcacatgaaaacatgctcaacatcattaactgttagggaaatgcaaatctaagctgcaatgagataccacttcacactcctaaaataagatggctaaaataagaaaagttggacaataacaggtattggtgggcatagagaaattggaatgcttgtacgttgctggtgggaatattaaatgattcagaaacgttggaaaacagttggcattcctcaggaggttgagcagggagtcaccatacgacaaagcaactctactcctaggtatgtacccaagagagcagaaaacatatgtctacacaaaatcttgcacataaatgttcatagcagctttatccatagtagccgaaaagtggaaacaaccaaaatatcactcagttgacaaatggataaataaaatgtggtctatgcattcaatggatgattcagcaataaaaaggaatggaattctgatacatgctacagtgtgggtgaaccttgaaaacattaggctaagtgaaagagaccaggcacaagagaccacatattgtgtgattctatttgtaggaaacatctagaataggcaaatctagagaggcagaaagtaaattcatggtttcctagactaagagagagcatttgagaggaatgggaagtgatgggtgatggaaacagagcttcttttggggatgatgagatgttccaaagttcatcatgatgatggttacacaactctgaattcactaaaaaatgttgaattgtacaatttaggggaattgtatgatatattaataatctcacaataaggctttaaaaaaaaagctcagccttcctgagattaattttatacagataaaatgttattaaaataagtatgggctgggggctgtgattcgtacctgtaatcccaacactttgagaggcagaggcaggaggattaccaggagcttaagaccagcctgggcaacatagcaagaccccatctctacaaaataaaaataaaaactatagaaaattagccaggcatggtagcacatgcctgtagtcccagctacttgggaggctgaggcaggagaactgcttcagcccaggaggtcgagcctgccatgaactacgatcatacccctgcactgcagcctgggtggcagagcaagaccctgtctctaaaaaaaataataagaatggctcatagattgtacactttgcgtatggttggaaggcccagaaaatctgtgtgtaatatcttcttaccctcagggaaaacagtgatcaactcttcctgaaatagttacatatcataccccaataaaggattttactctcctccaaaaataaaacaaaaagaaaatacacaaaaaactaaagaaacatggtttcaggccagaccatctgggcaatcaacagaagcaaaaatgattcctctctggagagatattgccaaagccaaattatccaaaataaaaagcctttttaaagatgaatcacaattgtcaagcacacaggcaatgatttgccatgagtaaaaatgaccagttttaaaaaaagagagaaagatagagggcttcaattacattaacatacatacaagtctgagagaaatatataataactacatttaaaattattaaagtcttagtaaaataaagcgttaacattttaagtaaagattaaggtaccatttcttaaagcagatttgtttttagaaaaaataaatgggacacagtcattgaaaatgaaagcagtttagacactgtcaaaaagagaattaccaaattaaaagctagatttgagtaaataactcttaaaacaacataaagacataagattgaaaatagagattaaaagacttgaagaacagaatgagatctaccacatagctaataggactcgaaagaggaagcaaatgagagttacaaaatacacagagataatagccgagaaattccagggttgatggaaagcattatttacaagactgaagaaacaccaatcccgagtggagtaaataaaactgaattcataccaagatgtatttgctacaactgtaaaatgccaaagagaaaaatcttaaaaacaattggagtgaaaggcaaataatcacaaaggcaagaccatttgactgaggtgactattcaggaacaacagaggccagaagacaatgggataataatctcgaaggagctaaaagcaaataactgccaacctcaaattttatacccagataaactaatcttccaggattttattcagaaaacagcaaagtaaatgctatataaaaatgaagacaatttaatcaaaatagatatattgttttgataatttttcaaataatactcttttttttgaggtggagtctcactctgtcacctgggctggagtgcagtggcatgatcttggctcactgcaacctctgcctcctgggtgcaagcgattctcctgccttagcctcccaagtagctgggattacaggtgcccaccaccatgaccagctaattttgtatttttagtagagatggggtttcaccatgttggccaggctggtcttgaactcctgacctcaagttatctgcccaacttggtttcccaaggtgctgggattacaggcataagccaccacacccggccaagaacactcttttaaaaaaaaaaaaaaagaaagaaacctatggcaaaactgctgatttgagactcttttttttttaaacaaacatttccagctgttgaaaacctatctttatagtagtcaagagaatgcagaggataatattttatgtgtaaatgtattccagggtttttcttctgactttgttttttttcagacaatcttgtatcatcttttacacaagaaccctgaggagactttctctagcgatgttgtttatttttgtagatgctactgtgttttaattaatattgagatatagattttgtatcaaaagaagcaagtggatttacctttgtcctagctgattgtagcatgtatggtgatacggtttggctccctgtccccacccaaatctcatctcaaattgtaatctccacatgtcaagggagggacctggtgggaggtgattggatcatgggggcaatttccgccatgctgttctcatgatagtgagtgagttctcacaagatctgatggttttataaggggctcttcctcctttactctctcttttctctcctgctggcatgtgaggaagttccttgcttccccttcaccttccatcacgattgtaatcctgaggcctctccagccatgtgtaactctgagtcaattaaacctctttcctttataaactacccagtattgggtatttatttatcacagtgtgaaaatggactgatacatatggctagaggggaatcacatagagcccttgcagaatcccctgtatcagcctcactgtttttctgttcatagttcatgttctgttcacttgttcagaggattttgatcaagagtaggaattgttcttgcaactgaagctttgttttgtcagttattacattctttcttattttgagggttatagcttatggaagggtattttttagtttctaattgaatgtgtgtttaattagaaactggtgcaacacatattgctctgggaaaaaaagttttggttcacgtgtttccatcaaaaattttataattgggttattgatcttcatttcaagatgtggatgattcagattctggacatgttgaatgctggaataacgagctcccagggacccctcttagaccagtctctcttctggttggtgctggtgctccatctctgcccgtcctaccacctggggaatctcaggggcccagatgctgcaggacttccgctccccctccttgtgtttagctcatcagaatggagatttcacagccttcttctctgggaatctccccacctctgactggcaaggccctcccaggtgcagcagttttgactttgggccttccctggccctactaacatctgaaacttactctccccagcagaaaactcgatccttttttgaaatggggggaggcagggatgagatggggaggtgaaggggttgccagggctgaatggtgagtggacctgatggagagggagaaggattggagagagaataaaacaactgccttttgtctgaaataagtctcccctcaatggaaatagcagctcctgggagcttaggaatggcccagtgtgcaggagtgctgaaaacacgcagagaacacacagcagaatgctcggagccacatttcaatgaagtttacagttttgaagtgcagtttaacaggttctgtgacatcttatgatatattatgatatattctaaggataaatgaggccttaaaaaccgagagagaccacatgaggaggaacagtgagctgcatagtgtgaaatcctacagaggggagagaaaaaaatgaaggagaaaagaagccatggaatggctttgtttttaatgaaaggggaattcccaagaacatctcaaaacgtaagatgtcaggttggaaagggagttgaatctacttcaaaatagatgatgggtaagaggtttctttttcaattcttgaaaactttgcaactccatggcagatcttgtcctcgtaggatttaaatgcgctgaaatttccatcctgaactctgccattttctttgctttagctgcctcacctccctatctccacgtgagaagttcagctgcgttcaaagccccgttggtgtccgaattgctgcaatccccaggttgccctctttctccagggacggggttggctctccagtaaatacctgctcatcccaccacatcttagaaaaacagctgtgatttgtaggtctatagggagaattgggcactcacagtttcccacaggaagcagttaaagattacagaagtagaccatttgtgttgctatgacaatggcctctctttttgcagacagggacagaggttttagaacctggtaccaacgtcttgggcatacagtgtttggtgttcttaccttattctaaatatattcggatacgttgtaggtttacattttttttttaatgttagtgccccctttagctcatagttgattcaaggtcccagtttatcaaacttttgtataaaatgagcaatgtgcaagccatttcctggtaacagccatggtggcatttaagacaccctatgggagctctgtgcaggcccagggagcaggagtgagccgggtggagccacagctggaaggcaccagggacttggggctgcatctgtgacaagcccccttcctctttggagaactgagcaaacttcacattgcaagtattccctttccgtgacacctctctactcaaataaatggatagtatttcatagaagcactgagtaactgaatgaatgactctcaactgacatatttgggaagattggactggctggcattatctccctccaaaaatagaagggggctcacagtgtttttatagtgacaggcatcactgggggttttctattttgtggacacattcactgacctacacccagcagccgatctaatgtccatgcagggaaggtgctcagcatggtagggggagaagggaagggagagatgctgcctcccagggctctcaggatcagggagcgtgccccttcctgggggcaggcatcccaggcctttgctctgcaggttcctctgtggtttcagagaccccacagggtgtggtgagggttgcggtgaggccactgactcgcgtcctgaggcttagtcatcctcagccgctggccctgttaggctatggcctgctttggggctgtcctttctcgcccctcccttgtctagggaaacacctgtttgtggtggtgaggcgagaagcttcccacacagcatgagaacagctcttctaggatgcacatgaaccctggcattgtcttaaagactgtgttcgtgtcatagcagaatgccccaaacggggtggcttaaatgacagaaatgttttctgttaccattctggaaggtggaatctgagctggaggtgttggcagggccatgatccccctgaaagcttgggaaggatctgtcctgggcccctctccagcatctggtggttccgtggctcggacagcctctctcccatgtccccacagagttctccctgtgtgtgtctgtctcctcccatggcactctccctgttgtgtgtctgtggacaaattcctttttttatatgggcactagtcatactggatcaggggcccaccctatgcagtatgaccgcatcttaacgagttacatctgcaacaactgtgtctccaaataaggtcaccttctgagataccggaggttaggataacaaaataaggattcagggggcacaggttcaagccataacaaagatcaaactactctcgtgtagaaaatcttgcaattaaatgtcataggttgcattattgtgcaagccccccaccatgttactttctgtcttcagactaactaacagtgctaccctctcagtctctgtgtaatgaggaagtctgaatgtctgaaggaatagatgagtgaatggatggatggataggtgatgggcgaatggatggatgggtggatggtagatgaatggatgggtggatggatggatggatggatggatgggtgggtagatggatggatagatggatggatggatgggtgatgggtggatgattggatgtatggatggatgatagatggatgagtgaatggatggatgggtaaatggatggatgaatgaatagatggatggatggatgggtaatgggtggatggatggatggatggatgatggatggatgagtgaatggatggatgggtgaatggatggatggaaagatggaatgatcgatttatggatggatggatgggtggatggatggatggatgggtgatggatggatggatggatggatgggtagatggatagatggatgatggatggaggaatgaatggatggatgggtgatggatggatggatatgtagatggatagatggatggaggaatgaatcgatggatgggtgaatggatggatgaatgaatagatggatggatggatggatggatgaatggatgggtgatgggtgggtggatggatggatagatggatggatgatggatggatggatgagtgaatggatgaatgggtgaatggatgaatggatggatggatcactggatggattgattgatggatggatggatggatggatggagatggatggatggttggatggatagatgagtgggtctatgaaagagcagaggaagtcctcgcaagtgttcctgctacagaggtgcatgtgtgcatcctgctgttcttggagccctagtagggcttgtgaaggagaaggaaacagatgcttctactcacctctgtgtgccagtgccctaccaggcacctcagtgtttgctttcattctcactctaaaggctaggactggtcatagcatcctcctttcactttcttcaaaacaactagctattgatcacctgctgaccaacaagtgctgaccaccaggaggggagagtgagaagactcttaagtaaggaaggtaggccaggcttagcctttcacaagtgggacaactgaggcacaggtgatcagagcagcatctccagctcccaccctgagtccggccttactccatcactccaggctatttccctgggtatcctggagaccacctgattcaaaaggagactttgccaccaaacagtatcctcccagaacctccgttgcttcatctgcagagtgaacccccgaatgggatatggtggacttgaagtgtctctcctcctttttcaaccatgggggccctgaagtatggcgggatcttcagtcccagctgagagcagctcctccatgctgtttataaacagggccttccctgactgctaggggctagctcaggtccaggttttcctatctgaatggtgtttgaagtttaaatcggtccacaagaaaattaacaaagcaaatggagattgtctagaatataatacccttgtttttaaagtttcactgcttttatacatattatatctgaatcagtgcaaacatatcaagacaaattagttcagtgatgttgtacacagaagagagatttcatgaaagtaagaaaatgatcttacatgtgggccgggagtggtggctcacgcctgtaatcccagcacttgggaggccgaggcggacaaatcacttgaggtcaggcattcgagaccagcctggccaacatggtaaaaccccatctctagtaaaaattcaaaaatcagccaggcgtggtggcacatgcctgtaatcccagctacttgggaggctgagacaggagaatggcttgaacccaggaggcgaagttgcagtgagccaagatcgcaccactgctctccagtctgaaataaagaaaagaaaattttcttacatgtgtatgggtcgagaatggcatggctggcctcggctgcccatctccttttagaaaaacattcattgaaatggatgaatgcgattttctcagctttagttttctgatcggtagaaaaggggtaacgatacctacttcattgggatcattgtgggattagatgcaattatgtaactgaaggcagttggcacagacaggcactggataagcacctagtcaacctaccctcccttccccttcttttgtgtaaatcctcacgcccccttctctcttcagcttctcctgtccctatcacagaataccacatttagagctgtcagtgaacaggcatgtgtctgaaagtcaggatttcctatttgagataaaagtctgcagtttccacaagttaatacagcaaacagaccaagcatcttttttttcttgcttggtggactcaggtaaaattgagctgctaagtacccaggatttatggaatttgttgctaatattaaagagatttacatgtccgttatactcctgtaggtttaatctgatcactacaaaatgcttagaatacgttgctatttcaaggacaacttgattatttgggtgaaagctggatctttgtatgtagacactctagattttggatgctaatctacttcattggttctttgcagttccttcagccgcccctgagaacgtgtcagccgaggctgtcagctcgacccagattttactgacatggacatccgtgccggaacaggaccagaatgggctcatactgggctacaaggtgtgtgatcacaggatgacctccctttgcttaaagagtgggctggggaaatgggagcatgtgctattcccccaaagcaacgagcttcctcttctcctacagatctgcagcgtcagccagtttgtgatttttattaagatattcagttgtcttatctaagcctcattgcagcctgggaattaggcatcagtataactatgacacaaatgccaaaacagggcaccagaagaaaagcacagccggagtggaactgacctccgggcctgcgcctgactctgccctcgctggcctcagtgccgcgggccagttactgaagccctgtgcttgtgtctccccgcttgtaaaacgggaataacgatggtagctttgtcccagggttggtgtgagaattcagggggtcttttacacagcacgccttgctcatgtgaagggctgggtgaggtggatcgctgtgtgcatgtttctatgtgtgtcatcacggtcctagcaatggcatccgctggcagggttgaatctgtcccagcttctctggggagccatttctgggttccatcttccatgcatccaccccacccctttaaaacccccttctgttcctcgttccatcactcggggcgacaggctctgtctccccatctgctccttggctcagcaatgccaagcatcagaatgagctgtttcggacccggccagcgaggccacgcttgtctcagtgctgctccctgggttttgagcgtgcctcctccacctttccgtacttcacatccctattctttgttttccccgcctgctctcccatgtcttctcccttccccgggtgttctaagtgcgccctgctggctctgtgacacatggcagtcccgttgaggggattcagtgaccaaaacttcacaccacattcctggggccccgagaaacgcgcttgctgtgctattttcaaacacctccctgctgatgctatcctttatggccttccaggtccccgatctcagggagcagttcagagaaggtgggcattgagtgaggtcttagcaggaggccctggagcagagcagcttggggtggggtgccctggaggagagcatagaggagagcagcttggggtggggtcccctggaggagagcagcttggggttgggtgccctggaatagagcagcttggggtggggtgccctggaatagagcagcttggggtggggtgccctggaatagagcagcttggggtagggtgccctggaatagagcagcttggggtggggtcccctggaggagagcagcttagggttgggtgccctggaggagagcaccttggggtagggtgccctggaatagagcagcttggagtggggtcccctggaatagagcagcttggggtggggtgccctggaggagagcagcttggggtggggtcccctggaggagagcagcttggggtggggtcccctggaggagagcagcttggggtggggtcccctggaggagagcagcttggggtggggtgccctggaggagagcacagaggacagcagcttggggtgggatcccctggactagagcagcttggggtggagtcccctggaatagagcagcttggggtggggtgccctggaagagagcagcttggggtggggtcccctggaggagagcagcttagggttgggtgccctggaggagagcaccttggggtagggtgccctggaatagagcagctcggggtggggtcccctggaatagagcagcttggggtggggtgccctggaggagagcaacttggggttgggtgccctggaatagagcagctcggggtggggtcccctggaatagagcagcttggggtggggtgccctggaggacagcagcttggggttgggtgccctggaatagagcagcttggggtggggtgccctggaggacagcagcttggggtggggtacctacagcatgcacagctgcagatggcccaaggaggccagagctcccggtctgtgtgaggacagcaggtcttctggggcaggaaaccagcttccatggctggaaaacccagggggctgctggctcctgtggcaggaagcagagtgttgtctgtgttcataatcgagtctttgttttagtggctgtggttggcatggctgcagttgggccctcagatcttgcagattatgaccaggcagcaggctcgccaagccgtgggcactaactcaagctcccctggagcgcagtcactttacaaccaccttcctccccaaatgccagcatggacaaattagatccagaagccctgcacacagccatcctcagggagaaagcacagttggctgggccttgattcacgaagggggcctgccccatgccacggcggtccctcctggcacccgcctcctgataaccctcgtgctgtgtcgataccacagatcctgttccgggccaaagacctggatcccgagcccaggagccacatcgtgcgagggaaccacacgcagtcggccctgctggcaggcctgcgcaagttcgtgctctacgagctccaggtgctggcgttcacccgcatcgggaacggggtccccagcacgcccctcatcctggagcgcaccaaagacgatggtaggtccagggttcgcgccttcgggagccttgctgcctcccaggttggcctttccaatgcaaacaatttggattgttgtcgcttttaacttaattttcaaaccactttcttttgcagttgagggaaacaaaacaaaattgtttttcagtcactgagcacttatatggccaatttcagcctggagtggatttttacagcctaattatgaacctgtactgagtttccctcataactctgccgtgggcagtgctggggagaggcagcagaggctggggcggggccgagctgtggatgtcagctgtggacgctcctcttggcaggggctccacacacttcgtgtagtgcccccttatctggcaacacatcccaggaccccagggaatgcctgaaactgcagataaaaggagactactatagtttaaaaaatccacagtggacctcatgccttacttccctcggtactgccccgtctcactgtttgcattgtgggaggtaattagaggttatagaaagccccgtgctggatggcccagggtccccagctccctgagtttctggacctgaatcacaaggacgccttgccagctttgttttcatggaactctaaatcatcggtaaatatgttttcccactctgcagatgtcaaacacataaaggttagcgcctttacattttcattattaaacagactgtaatgaatacatcagggagagaaatgcggatctctcccgccacaacacccaccctggggatcggagtggctgaagaagtgaaacacctgtaggttttcttaagcatctttgctgagtaactaaatgagcccgaaagtcctcttaactgctgagtggaaagcactctctccacgttgctgagagagtgccacccctgatcctcgcctcgcctcacggagagacgggaaccctgcagaaggctttgtccatccttccctgacacaaggtctcaggctagagggagatccaggagggaatgggaatgtgggtgttgtttccttgcaaaactatctcctgctccagtgtattccaggtttcccagatgaaagtaaaaatgggcctattagaaactgtgtgtaacagcaggcccactgcaactgttccctcctgaagcaggcgctggtgagtcctggaatgccgctgcttcctctcccacagcgctcctgtagacatgccttcctcctctgctttccagcataatccccataaacagcctgggagagggctcaggggagcaacgctgcttaagtctgaagtcagcgtttgcgtatctgtgacttagtcctagttgggagcctgtggcctcctacagacatttatttcaccccaaaataggcgtcataacacacattcagaatttaaaatactgttcccagcttcatagccagggacagacgtcagcggcccagaacgacgaacatacatccttttattttgatattgattgtttcatgcccattgcctcttacctgggaatcggtcagttattaattccaacaagaagctctcatactggccacacacttacttgcctgttcgtttaagtaaatgtattttatgagggccacaaccctattattcagcagttccaccacacctagctgctttttcagttattggtgccccgaaccacacacaagaattattatatgcatttgtgcacaccaactcttaattatctaggatgatgcaggagagaggtggcatgcctacgagagaaatgattgaggatacacatgttatttcatcagaaattgtaacctccgttagagttgggaggaacttcaggccgcctcatctaccacctgctttgcagatgtcaaacccagtaagggaatccgagctcagatgagggaaatccttcctctcaacctgatgtttgctctcagagtcatttagtgactggtctacttgtgtcctggtaggctggttacactcacactattcctggcatagttcgtgaaccctgcttttgagtcttggaaagcagacgggcagggtttaaagggaagtgtttgctcaagatccttagggagccacactaccagtgacattccaaaagtcatcagtccaaaactttagggggttctaaacccacgacagtgtagcctgtggtagttactgcagccagctgaccctcggaatcctgtgtaacctgtcacgcacccaaggaacactgtcttgagatctgaatccctgtggtttttcccttcagccccaggcccaccagtgaggctcgtgttccccgaagtgagactcacctccgtgcggatagtgtggcaacctccggaggagcccaacggcatcatcctgggtaagggagcggcggtggccgggcgtggtggctcaggcctgtcatcccagcaccttgggagaccgaggcaggtggtttgcttgagcccaggagttcaagaccagcctgggcaacattgtgagaccccatctctccaaagaaaaaattcagactattagccgggcatgatggcatgcacctgttggtcccagctacttgggaggctaaggtgggaggatcgcttgagcccaggaggttgaggctgcagtgagccaagattgcatcactgcactccagcctgagagagagtgcaagaccctatccccaaaataagaaaaaaaaaggagtgatggtatttaaaaggagagaaataacaatcaagttgatgtcttccgtgtttgttagatgtttatgaggttaaacaaaaggctgtctccagcagcctagcatttcctgaaccgagatgatcatgggcctcttgactgttttctgagctacgtactaaaggtttttcttatggaatgaaattcacatttttttaacgtggaatttcttccattcgtttgcggctcatggcgataccgtttgtaaccgaccttcccttcctctctgaaatatcaggctatgttgatgtgtgtttgagaaacaacaggctagtttttcagagaagatgcagacctagccttggttcccatgttcctggaaacatctttctgctgcagcacttgcacccaatccttgtaagaagccgctgagatgaagcgcatgccctgggtcccggggaacgcgtttacttctgacttttcagcattacagccagcataccaactctggtaacacagatgaaaagcctgaatttttccgttccccaaagcaacaaattctattttaaaacatcccagttccttgactcattcaccctttcacagagacaaagtaaggactttccctgtgcaggtgtcgtatgtacagtggggggtgaggaatgaatgaggtgtgcctgtcctcaagttgcccacagtcccgtaagggagacacatgttgagagtacagtgagataagccatctgaaagaggtttcattcagtgcctcacacacagctccttctgggtggggtctctgtgggtggaagtctccttttgagagggatctggagataggtggcttctaaagccttggaagaagggaagggggctgtccactcagccaagaccgaatgctttcagcctttgggagcactgacagctccaaggctggggatggaggctgggccgggtcttgagctactgtgagctccctgctgtgtcctggagaatgtggccctgagacctggacgttttaaactggcctgttagaggcaagtgcagcagccacagaacattgccccagccccaggttagctctcgggatattgccataccagacaccccgattcggctagcctgtgttctaggtgatttacggtaaagttataaacccagacttacaaacaggtggtaaaattcaccacttttgcctgcatttgatcttaggattctaagacttggtttgaagaaagagtttcacatcactaaaaaaaagtttggaggcctgtgttgaacggcagcaggaattcatccaaggtctttgagtgggaaagctgcgcaatcagatttgccttgtaggtaatcactccggcagcctgagaagggtggacggaaagtcagatatttattgagcccttgcttccctgagagggggcctggagcttcctaagtcttctgcacaaggaggctgtgacctattttcgctttgcctctttctttatgtgatttctggagttgctagacagaagtgtttggctttgagtacggcatttctcaatcaggtgacctttggaattgcgggttcctgctactaaaatctcagttgagcagccaccttggaggtgagcatttcagggcctggcccggcggagagggagctatgagccacatctggtgcctgcgcagtgagcccagtcttggggtaggaaatggtctgcccagcagacagctgtggcgaggagatttgcaggagccccacccaggcaggccctaacctcagcacagcacccaggcatcagccttttctggaacaagcagggctaatatctgattacccgggagctgtccccagcatgctgtgaaacaagaaacattgacagagtcacaggagtccacaacaacagtgttccccgtgaagaagcaggctcgccccagccccacctccaccctggcagggcccctggctcccactgccggcctcggtagaccctcccggcaagtcctcactctatggtcacctccgtccactcactgtcagcttaccgggctgccaaggatcagttctggagtgcggaggcgtgggagcggtgcaggagcaaagcatgtgcttcatctgtgcttctctcttgccacagacggacgcgtgctcagattccagtactgtgactttgacccagggcgtccttgcacacgtggggaggctctggcctcagccggctctaggccccgccctctgcctgacacccacttcagggcatctgccctttctgaggactcacgccgatgtcctctgtagccccgggtcctcactgccccgctccctgcacgtgtctacctggtgaggcttctcctcagcacgcccgccggagtgaggcccgctgtccactgagcccatcagctggttttatcatctgtcgtttactttccagactgtctctgacatttctttttccgatgacaagagcactataaaatgataattgaggccacaatgaaatcccatttcacattcgccagatttggcaccataagtagctgtgataatgccaagtttacatgaggatctggagaaacaagacccctacacccttgccaggagcgggagtttgtgcgtccactttggggagtgctcaccaggaaaggtgagcgcattcacactgcaccccagacgctctgcacttccaggccttcgccctagagaaattcttgcctgtgtgcacaaggagaaacgtacaaggatgttcattacagattcactgaaatagcaagaaagaaagcagctgtcgtctgcacaagtcagatggcacgaaccttggggctgcctgcttttcctttcccctgtgttttcaacactgcatcacggacaagtaggccggcagcctgggtaacgttttggactcagatctcagcctatgcttattagctgagtgaatttatgcgtgtttcttagcattcccatgcctcagtttccccatccctcaaaggggaagcacattcgtgcctccctcactggttagagttgcacttagaacagtgcctgccacatagtgagtgctgagtaaacgttagcttccgtatcagatcgaatatttcatcgtttccctggcaccagaggaggctggaggctccctggacttgagagctcctcctagaccattgggggctcagcctggtcctagtattcccgttgcatgcagcagtggtgtgctgccttgatttgtcctccataactctggttgctgaagcagaggcttcttgccgacaagagaaagaaaacttagaaggctgcttgggttacagagtgttcctaaagtgcgtcgggaggtatggatcttgatttgtggtcactgaaagccactgaagcccaagtgaggagaaggataatcacttaaatactttgagccctccaaccgtgctgaacgctgctgaatcacacagcaccgtgtctacctgcgaggcagacaacgtcactgccgagcctcctctgtcatgcagcattggcttgtaattgtaatgcatgttgtccgggtaacctgtcacccatgggtcattacagccggcacaccacacggcggaggctgcaggaagacaggaagacaattcctgcaaattcagatgggtgttcacaggggagaaagcaaaacatcttttcgtctgactcactttacatccagagaccttgaatcaatgttcccactctggcagcttggccttctgagtacataaacacctctgccgcccgagcttttgtaatctatatcaaaacatgttcttgcatttccaaaagagattaacagcgtgaaccacagcaggcacctagaggagaaaacacttgcttatttgcgtaaatattttactgtggagtgcttttagcatttagaacttttctttggggggatggggttggaaccccctgagtacagacgtccctccctcacccaccagctgacaccacatggccttgactggtattacgctaacgtgatgatgcgtgagctcttcagacccacttgggcctgccctggccagacacgcgggatcccgccctgccagcaggagggcctaacatttacctttaagcttattacgaagggtgtgcgggaactctgcggagaatcaggagctccagcaagtatgatccctgttggcagattcagcgttttgatccccagcccttggatggataagctgcaaaacccacaggccacggcatctaggctcggccagcgtgggcgtcctggggcgattcagtggcttgcgggttctctgacccacttgcccaccaacagcagctgcagagagatcggcagcacgtgccccagatggtcgtgctttggagtcatgagcgctggggtcccagtgatgctcactgaacagcaactctcagacaatgccttttgtttcccagggaagtgcacaatttattaaaggtttgcaactagctgggcacggtggcacacacctgtaatcccagctactcagggggctgaggcatgagaatggcttgaacccgggaggcggaggttgcagtgagccaagatcgtgccactgcactccagcctgggtgacagagcgagactctatctcaaaggctttgcagccacctaaaacgtccggatagaagtctccaaattgctctgtgtatagctgtgcggcgtcagtcttcaggctgacctggagctgagatgcctacaaggcttccagtatccagcctcagctccttagtgccaccttcttgtgtctcgagcagtggacggttctggaacttgtctcaggcccgtggcgcagtccctttctggattctgattgtctaaatgtgcagtgccacctccgtcttccaggtgtattcagaaacccactcaggcctctcacttgatgtttttaatcttccatttggatcaatgtgtctcgtacttggccttgctccttttaatgctcatattatcataattcacccatacccttaaaaacagggctcctcgtaagccgcattttactgctgctattgattcggcctgttcattcctccctcgcacacgccgccgtcttctggccttgcgtcgctgaagtgcagcgcactgatgtttctgatctcgctgtaaccgtaattacataactagccttttccacagaaacgctcttatctctgaacaccatctatcattattctctaaaaatgcaaggactgctactcagctgctcctttgtgccatttatgtacagaaaaaaagctgtcttctattgtccatcgagtctaggactttttaaacgtgtcaaggtgagctataggcattcatctttatgttcagcagaccgtggtgtggcgaccagctgatattatctttattttagggcaaataataggaaggtacaaatagaacacacaggccaaggagttttcttccagtgcctagggaaccagatcagagagagaagaagaacccagatttctgcaattagcagggatgccgtcgtgctttgcaatctgcatacattgtctcactggggctttgccaggcctgcatcctaaaggtcaggggaggggagggcgaccccactgcaaactccccccttcctacttgggtccagcggcactgccacgcagtgcactattaaacagtcattaaaattcatgcttctaaagggaaaacatgcttttgttatgttgtgcagaaatcgcagaatgaaaaactcatactgagtgtggaaatccgggtttgttgagtactcatatgcgtagaaaaatgattaccaaaggccaggcatggtggctcatgcctgtaatcccagcactttgggaggctgagaagggtggatccacgtgaggtcaggagttcgagaccagcctggccaacatggtgaaaccccgtttctactaaaaatacaaaaattagctgggcatgttggcacacacctgtaatcccacctacttgggaggctgaggcaggagaagcatttgaacctgggaggcagaggttgcagtatagccgagatcataccattacactccagcctgggcaacaatagtgaaactctgtctcaaaaaaaaaaaagagagagaaagaaagaagaaggaaggagggaaggaaaagaaaagaaaagaaaattgatgactaaaaaaagtcccaagacagctacagttatctctgagtggcagcatggtcctcctgcagaccagcataccatcaccccagcttccaggccatcacctgggactctgcccaggggctttctgtggctgccggagcctgctaggttttgaggactgggccatacattcaaggggtgcccccaacagcccttagccaaccgctgagaggcagtgggcgcacactgcagctccccccgtgtcatgtgttggggacgaggctaacaggttctccaccggcccccacagtgggaggagcccagccccacggcccctgccttgatgcacacacgttcatcagcttcttctccgtgtcacttctctacccaccccccatttcctggagtgacctcccaaatcgccacttgcactccagtcctggcctcaaggtctgttcgtggggcacccaccctagggccaaaggtgatttcatgggtttttttttcctgctttttttgggtggcttttatacaaaagaagcatctatctatctgtatgtataaacaactatatatgtgtgtatatatgtacgtgtgtgtgtatatgtgtgtgtgtatatgtgtgtgtgtgtatgtatatatgtgtgtgtatatgtgtgtgtatatgtatatatgtgtgtgtatatgtgtgtgtatatatgtgtgtgtgtatatgtatatatgtgtgtgtatgtgtgtgtgtatatatgtgtgtgtatatgtatatatgtgtgtatatgtgtgtgtgtatgtgtgtgtatatgtatatatgtgtgtgtatatgtgtgtgtgtatatgtatatatgtgtgtgtatatgtgtgtgtgtatatgtgtgtgtgtatatgtgtgtgtgtgtatgtgtgtgtgtgtatgtgtgtgtgtgtgtatgtgtgtgtgtgtgtatgtgtgtgtgtgtgtgtgtgtataatcttgaaaagctgaagccccaggagcgctatgggactgaggggctgagagctttagcaccgcatcagagggcctcgccctgcgctgtctgggctgtcttggagctgggtggagccctcgggactcaggcagggagagtccatcgatgggaacgatctggtaatggggcagggccccaggcctccctgaacaacaagaccccactgttctcccatgagcctattcattgtgcacctctgggccagctctgcaaacggtgattcctgccaggcccacactctggaagtgtgacctccagagtgccttgtccccctgtcaccacctccctgggagcacacaggttcccttcctcgtgctctggctgctgcagacagtggcgctgctcctgcaggccttctctgccgccccgctccaccccagcctgcacctcacaggctgctcgtccccctctcagatcagtggctttgcctctggcccccgctgcatagcgctctccctgggcccacctcagctgacctctttcctgatgttactccccaaggctcttcccgaggactctctttctttggcactttctggaacaattcagcctccccagatgggagccctcacatgctggaggcgtggctctggagctgggcccaagtgggacccccggccccacgatgaggggctgtttcttgatgttttgcagtttcccccactctgtgtcggtcaccttcagaatgtcctgctgagtgactttctctgaattgttttctgtttttttctcccttttctttaatcatcagaatcccatcatactgcagcaggggggagctgaggccaacagcagggtatcctgggaagagctggggctcgatgccgagggaccccagccctgccctgtttactgtgtgctcgtgggcacccagcccctccttgcctgcaaatgtgaaatggaaacaggaatatctgcctggggaatgtcatgaagtcttaatatggtagctatgaagtgcctggaatatagaggcccctaataagctgtgtctccattttaaaaaatgattaatagaggccagacacagtggctcatacctgcaatcccagcactttgagaggctgaggcagaaggatcgcttgagccgaggagttcaagaccagcctgtgcaacatagtgagaccccatctctattttaaatttttaaaaaaatgattaataccaagagatgagaactgagagtcaggcagagattagaatttgcctgagggctgggtcaggagccaggtctcccggctccctgctgtctagtcaggagcttctgagagagaggcaaggaccacacacgaaaaacaatccacaaacccgaggcagtgtatcctccaaggcaagtgaggtgaggcccacgtggggcagtgaaggggcaagtgcataaccacatgatggaagcctgtgtagtctgcggcatggccaaaggcagggctcaccttggaggacagaagagtcaggtggggccattgatagaaaggagggtctgtaagcaaacctcagacagcttggcaagaagaaaccagttcccacataatccccaaatcctgtgatccacaaggagtgcctttgaacaacatcttcatttcatctcaggattattacctctagcaatggaataatctgggcagagataaaacatggtgaaacagtaaagattaaacaataatgaaaacacgtctgtaaccatgccctgctcctgaaagtaaataatacctcattaattcagacatagtcactgaaaggcaatttggattttgagcgagaagtcttaatcacacacaactctccaacatattaagtaatgaatcaagggaactcaggtaggctggtgggatccataggaaaggcatgttcctggccatcggggatgctggggaaggccctcgttagtcgtctgtcggggccaggcctccaagcatcttccacacagggctttctctttctcttttagggataggcatgtttttgttgttgtttttgagacagagtctcgctcagtcgcccaggctggagtgcagtggcgtgatcttggctcactgcaacctccgcctcccgggttcaagtgattctcctgcctcagcctcccgagcagttggcattacaggcacctgccaccatgcctggctaatttttgtatttttagtagaggcggggtttcaccatcttggccagggtggtcttgaactcctgaccttttgatccacctgcctcggcctcccaaagtgctgggatcataggtgtgagccactgcgccctgccgggataggcatgttttttcacacggtgaagaagaaatctttttagccacttgtgcaaaatcagtgagatgatcccacctcgacagtgtggagggagcaggctgaaccctacgcatacatacatgagtctgtttttaatgcaaacttgatttttgctgccttagcgaaagattcgtatctcttcatctctaggaacgatattcagatgcctgaacttaacactgggttacacatcattcttggtggttttggttttgcgtttttgttttttgttttgttttctgtttttgctggagacagagtcttgctctgtcacccaggctggagtgcagtgacgtgatctcggctcaccgcagcctccgcctcccgggttcaagcgattctcctgcctcagcctcctgagtagctgggattacaagcgcccgccatcacgcccggctaatttttgtatttttagtagagacagggtttcaccattttggtcaggctggcctcgaactcctgaccttgtgatccgcccacctcggcctcccaaagtgctgagattacagccatgagccactgtgccctgctaaagttttgtatttttagcagagacagggtttcaccatgttggccaggctggtctcaaagtcttgacctcaagtgatccaccctccttggcctcccaaaatgctgggattacaggcgtgagccactgtgcctggctgctttgcactctttacctggcacatttgcatgatttttgagccatgtgaatgttacacagctcaagaaatcataacaatattgaatgtctttagacaaaaggcagcttaagcctagaaggtctccaagatgaacatcgattatgtggccagagatgctttttccaggcagaacacagccgcccagagacctcagaattagggtcattctcccagccccgaggaagcaggacattgttggggaatttacattttaagggggaactccgacccagggagtcctgttctgaggcacacgctgtaggtagttaactcaatcaggcattgcaaagttgggggtgtcactcctcagggctgggctaggggcttggccatgtctgttctgggcccctgtgctgcttccggtgggcattcagcaccctgtcctggagctgcaggggcctaaggcaccacgcccatatcagtgcctgtggacaggtccggggaataaggttccatggaggctgtgaggaatgataactctgtggtcataccggccaccacagggtgaggaactgctagggaaggggtcttgccagctggaggagggaggagaagtcgtgactgcaattgttttataataatattaaagccaggagcaaccaggcatggctgtgccagccaggtcattaccaccgtgagcccccagagccctcctggcaccccgtgaggtgtcctgccatatccttgcaccatgtagtccagcaaactgaggctgggagaggctgcatggctcatccacggtcacacagtgaatgattggcagagcgggattccagcccagaggtgcacccccaaaggtgtgtccttcctttgaagggcccgctagcttctattggagaggatgcttctgcgcagtgggccctggggtccgtggttccgagcaacggggacctggcgaggggatgctctccctttgctcacagatcggcatgggtgtttgcttctcccaggaagagtaggcacccatggggctccagcccgactctctcgtcactttctcgctggggacccatcttggagcttcacagcctcgtcctcatccttgtcttgtatgcttcctgacaggcctgcggcgagggtctggcatgggaagcgttgcagggatgcagcagggtccctggatgtgcctagcagtgtagccgctgtggtcacgctctcctcaccgtcagagtgcggggcggccaggagccccgaagcctcagactgagcttccattgtgtgtgcacggctgactccctactctcactgtgcaagggtcggggaaacgggaggcctgtgggaagagctggccctctccctactctcactacacaggggtgtgggggaaggggaggcgtgggggaaggggaggccgggggaaagagctggccgccgtctctaggctgccctcggtcagtcagtgactgggaaggaacaggagtctagcagggacacccttgccagagacctgaggccagcagggccacatccaggaagtctcagaactcccggtccccattgtggggaagacagcccgtccactggaggcagggcagcggctgcgacagccactctgggggcctaagttcagggtcctgcagacacctgcgcctagaggtggctgcgtcatggacagggcagggcgtgtgtccctgtctgtgtggcggtgatgacggtgctgatggtgagcggtgatgcctggggcctgatgtgaggatgcccttgaggtctgatctccgtgtaattgtcctcccacctcccagatggcgggctggggaggggtttgttaaatgcgtggatgagtgacaaggcgcaggagctgggaggatgcctgtgagctcggtcgttcatgaaccagagacctgagagcaggaagagctgagagagggaggggttcacccggaacagaggctgagggcagggggcaagcagcgtggggtcgcccggcagctcctccccacagagggtgagccaccagtgcagaggccactccacgaagaggcagcactgatgagaccggagcgcggctctgttccccccgtgcgtcctcccttgtttaactccagcagttgattttttttggaagccacagcgccccgtcatttctggttttaatcagcgcaggagctcagccgctggaccacacgttgtctgtgagccaggcagggtgcggactggagctgcagagttaacaaggttcctccagatgccagcgggggaggcctggggcggccagtggagaggagtgatcgttaataaggaacgtctggtcaaccccaagcccctcccagcggaggaactgagcaagccaggagccctccctcaactgggcagcacagggggattctgtaagcagagctgccctggcggagctgctcgggaggggtggggccaaagaaggggccggatggacgttgctggggtccctggagggagctggggggtcagaggtgcaggcagacagggaagacaaaggagggaaggaggagtggccgctgtggagctgctgtcctgcctggggaggccatgctgtcttttgcaagaattaaacgacttcctaagagagcgacggggagagccagactgcaggagggagggagaggcagagactgagaagccacagccctctggggagcagggagggactgggtccctgtggcatgctcgcctcgtgcccgcatcctaaggaaagatgaacccgtgttcacaccttgttctggtgaaggatggagcaggaaacaagcttcacagggaaatccacgtggggccccaccattcatcacagccatgagaccaccctttcagtgcacaggcagtgacctccagagacggggaagagacagatggccttccaggggtcagcacagggtgtgggcacagggcttccctgtgccgtgggtgactggctcagcagctgtctcccatgtcacctgcctgcagggtaccagattgcctaccgcctggccagcagcagcccccacaccttcaccaccgtggaggtcggcgccacagtgaggcagttcacagccaccgacctggccccggagtccgcatacatcttcaggctgtccgccaagacgaggcagggctggggggagccactggaggccaccgtcatcaccaccgagaagagaggtaagaccttgggggacccgggggtactgcagatgttgtgggcacagcttcctcaatcaggccctctggggtctgcggggtacctgggaggcttcggccttcccttcggagaaagagaagggatgtgagcatttacaaagcacccattgcacctgacatggagctggacacactatcaaacagcattgcattcacaccttcagcctcacacctgctctctcagacacgtgagcactgcgttcacaccttcagcctcacacctgctctctccgacacgtgagcattgcattcacaccttctgcctcacacctgctctctcagacatgtgagcatttcgtgacacactttcagcctcacacctgctctctcagacatgtgagcattgcatgacacactttcagcctcacagctgctctctcagacatgtgagcattgcattcacaccttctgcctcacacctgctctctcagacatgtgagcatttcgtgacacactttcagcctcacacctgctctcagacatgtgagcattgcataacacactttcagcctcacacctgctctctcagacacctgagcattgcattcacaccttcagcctcacacctgctctcttagatatgtgagacggtctcaggtttaaggaaagcaacattgctcgcagaggctgagtacctggggcaaggctgcagagtcaccacatttgaggttgagctccccgaaagcagcccccagtctctgatgttaaacccacgtcctccgtagagcaggtgctcagtaagtaagttttccaaataactgccttcccaatgagaactgccgggcgagcagggctctgctccacgcacggagacaggtgctccatgcactgcacttggcctatccttcctgcagcccacggagcagcatggcattagctctgatttttaccaaagatgagacagaggaaactgagagagttttattaatttgcccagacacacaactgcagagctgagatttggactcccctctgacaccacgaggccgactcttcccatgaaagtctatagtgggcgcccttctcagtgggctccgcgcatgtcctcgggccttgcagcgtccagggttggtgccacaggaccctcacctcagcagccccagctcccactccaggtcctgatgtcatggccagacccagggaccctgtgggaatgaggacgggagggagcttgcaggcaccactgcagggatacttggagcacacagttctggccacgctcctatttttgtttttttatttttgaaacaagtcttgctctgttgcccaggctggagtgcagttatgtgatcataggtcaccgcagcctggaatgcctgggctcaagcaatgctcccacctcagcctccccagtagcggggactacaggcacacaccacccagctaattatgttctgaagagacagagtcttgctatgatacccatcttggccgcccaaagtgctggggttacaggcatgagccactgtgcccagctaatattttaatttttgtagagatgggggtcttactacgttgcccaggctggtctccagctcctgggctcaagcgatcctcctgcctcagcctcccaaagctctgggattgcaggtgtgagcccctgcctttggtcctcccatagcattcagtgaaagcacatcccctctgtgaccattaccactatcattattattgttattagctggagggacggaagccctcagtcgccacagacacccgaggtgcttctgcaatgtaaagcacatggaagggatgccctgtgaaaggagcgcccctatccccctgctgccaccctgggtatcagcactcagggctgtcggcttctcaggaagatggtaatggctcccaagcaaacgttttgacttctttctctaatgtatttgtgtggttttatggttcatttatcttaaacattgactgtgcccctcccgcgagccaggcacgtgtgcaggtgcatcacagacacggtctcacagcaggtcctcttatttccccgtgtcctgccccacagccccgccccacagtcccgccccacactatgccacctgattatccggaccagagatttcggagattttccattggggcccccatcctccatcctcgtggctcagggagagggaatccaagagacttgctagttaccactaagtccaagagagcctttgaaacgggatacgctgggccacctcccctccggagaccaggtgaaatcacaagggccagaacgtgtgcttacggaggcaagtgctgatgaagtgagacgggagccctcctcccacacccgccactgggggccgacaatcaattgcagctttacacacgccacgcattctaatcagaatcaataatcttcatgataaacaattaaacaattattccttccgccgcggaacttctctgctgaaatcgatggggtgcagaggcacagcggcggcagatgatgggcactccaggccgggcctggccccaggcaccccgcgtcccgcatccaagctactgcacacaccagaggcagtgacagcccagaggtgccctcacctacagcagcactgagtagatgccgtagatgctttaggccctgggtgactgcaagaaggaggaaattcagcgttaaaggtggactgagcacaacatcagaaaaagagagaccaaagggaccacagggcttggaacagcccccaagaccctgcgaccccagctgtcatcacagacacagtgcctggtggtctggcagcccagggactcctgtgtggctttgttcctgtctgttggtctctatgagtagtgcatccgaagtcagccttaagatagctgctcagctgggtgtagtggctcacgcctgtaatcccagctctttgggaggccgaggcaggcggatcacgaggtcaagagatcaagaccatcctggccaacatggtgaaaccctgtctctactaaaaatacaaaaattagctgggcgtggtggtgcacacctgtagtcccagctactcaggaagctgaggcaggagaatcccttgaacccaggagacagaggttgtagtgagctgagatcacgccactgcactccaacctggtgacagagtgagactctgtctcaaaaacaaaacaaaacaaaacaaaacaaaaaaacagagcctctcatctccctgacccaaggaagggactggcttcagactgtccaaggcatgcaggcagctctcatgggcaagcagtcagccctgtacagcagcgtagcctcctggggatgttccttgggaagggcagcctctcacatgtccctggtctgtcctcatttggttgcagagcggccggcaccccccagagagctcctggtgccccaggcagaagtgaccgcacgcagcctccggctccagtgggtcccgggcagcgacggggcctcccccatccggtacttcaccatgcaggtgcgagagctgcctcggggtgagtggcagacctactcctcgtccatcagccatgaggcgacagcatgcgtcgttgacaggtactgagagagcaggagcacctccccggggaacggggccctggccgcctccagccagctcctgtccagatagtggggaggctgtgtgggccaagcaggtgcacccctgagagcacaggccccctttctttttgacactccccatgctgggaatcccagaactcctgggtcctggagctacttccaagggcccacccccagccgcttcccggagtctgctcttccaggtgtgcagggctggtttggtcaccccaggacccagggattggcgaggcaggggtgatggggggcaggctggacatgtgggctggagtcctagcccctcccaaggctggcaatggggaggggaccatgtggaggagggctgggctggcctcgggtgtccagggctggagggacgttgcgtccccttgcgttctcgaaagcagcagggagatggatggcaccacgagtactgtgcttccttagtgatggctggggaagatgggagggcatgcctaggacacgactagaatccgtccactcactcagttgtttactggacctctgggctcagcatgggagagggttgcattgacaatagcagcggcgttctgtgggtcccccagggtcctcacaactgcggtttacagacccacccactctttacagacaaggaaactgccacagtcacacagatgggcatcccagggcttagaagccaccccaggagtccacaccctcaccacatgccctgaccaggccctcctggggcctgtctggttcgcaggccctgcctgggcagggccacccgggacacccgccttgtgcttctcattggcccagagtttggtcacttgttactgagctcacactccaggctgtggagcgggggtcttggagtgagtccctccatgtcgcagggctctggagcctgcaccaatgactaagagggtagaggggccaagacggttgtctccaggctggccgagcttcctctgtctctcagatggtcacataggtcagctctgcgtccctgcagtcacccagtaaggggagaccatgatcccactctacagaggaaggccaaggtcagaaaagtcggtcatttgctcatatcccccacccagcctccgtggcgcccagccatcctcgtcttcgaggctgcccgtctcagcccttcctgactgaacctgaatgtagggagggaggcaggtcccaggtgaagcccctggcagctcctcagaacaccaccctggccccactctgccctgggggcaaagttcaggctttggagtgagggctgattggagtgtgggtgtaactggtcctagatgtgacaacagggggtttcaaagagaagagaaacctccaaaacccccatccctggcttgaggaccaggcccatgacagaggcgaagcacttgcccagggaggggtggccgaccgggcgtctcagtacagagctgtgaagctggaactgtgcaggctcagcctggcttctgccacttgccgttgagtgatctggggcaagtgacgggctctcaggtgtctccagctccctggcctttgagttgcgaggcttggaggtgataaggccctttggacggtcatggccatggatgccagtatcgcctttgccaccccacacagtgtccccaggaggcacagctgggtgtcaaatgcaaatcctgaccagagtccctgagcagtccaaggagggtcacacggaccatcgggaacccatgctgcggctcccaggcccccattggagaccacagaccagcaaggaagccagcgccccagtgcacagctccagctctctgtggccccagaggacccaccctggcacagtcaccctctgcagtctcatggtccaagcagccctctgctcttctgaaaatcgaggtggaatggtccctgcgcacggggcttgtttccagcaaggccagagccattgcctggcttcccctcttacagggcacaacatctggtgaggtccgtatgctggcgggttggaatttagaaaagctgttccgtccccacaactgtggttatgcccctcatgttaggaaaacgaggctgcagcagctccggcttgatgtcccctctgaggtgttttccctggtgatctagtcactcagcttccagacagttaaagctctgacaggacttcaccaccaccaccgccatcctcgtcgccatcattatttccggaatcccctcatcctgtctagcacctgtcattttcaacaccacttccatgtgtcatttcatacgatctttgtaacaaccatgtggacatgcagcccagacttctcactattcccagtttacacacgcagacattgaggcagagatatcttaagtaacgcatatgcaggtgccttgacgtctctaaatggaagggatatttcctgaggtttttgtagttgtcacattccgtgagccagaggtcaaggctccatagacacagtccacgtcctacagttaatttacaagggtctgcgacgtatgaaaacccagtgtgtgtgcatctgaacaccaaactttccacagtcagtctccccttagtagctgcgtggccttggaaaagtccaacccttggctgcctgctaggactctgtcctctcatctgtgaaaggcagggctggagcggggatcctgctgttccctccagctctgtgagtccaaggtttgcctcattgctgaccgccacggaactggcagccaagaaataaggcaatcggaagagtcagactgtccgccaggttcctgccagcatctcacttgccctttgagctacagcaacagaactcgaggggcacagctctctcccctccagaggaaggcactcctagtggcagataccatcctcccagagccctggaattctcctggcacagccccgagggtcaggggagtatggccaggtgcgcccagcctgacttaataaagtacacaggatgcttagcttaattggcagtgtgctcacatatataaataacctcaccctttgtgtaaccatctaaaagaaggaaaaaaaatatccagccactattcctgaaggcttctgaagccaaacagactaatcgtgtgtccgggacttcatgctggcaaggagaggtccatgtttcaggacagacagtttaatttggtataggagagaccaatgtcaatttcctaatgggccagaactaggacaaatgcttcctctgcctatcaatagagaacatgtcacaggagaatcccaggaaagtgatattttgtacactgccacagtataatctcccttcctgtttaataatcctgacagctacattttactttcaccagttgtgtgacatctgtgagtatccagaaaacattaagagtttaaatgtctcaatttggtgactgtgactacgtccagggaatatgggtcgagacccccagggagaggggttgggtctgagacgtgttcaggtgttgccagtgtctggttggtggttgaagttgtgagacggggtagccacccacagaaatgcagtagagaggaagaagagaagggctctgagcccagtgtgacttggaggttctggatgtcactttaggacagagcagtggctgtgcgggctcagggggtggctgtgcatctggctgtgatgggctcagctcctcctctgagctctgtcgtgggataggtgcgggggttccaaacagaagacagaaaggcgcagagggaatgagcatggaaaacagcagggattcaacgaatgtcagcaccacggccctagctccttttgactgatttcttttttttttttttctttttccgtataatgtaattttttaaaaatatcattatttaaggatcagatgggctgggcatggtggctcatgcctgtaatcccagcactttgggaggccgaggcgggtggatcacctgaggtcaggagatcgagcccatcctggccgatatggtgaaaccctgtctctactaaaaatacaaaaattagccaggcatggtggcatgtgcctgtaatcccagctactcaggaggttgaggcaggagaattgcttgaacctgagcggcggagattgcagtgagctgagatcataccactgaactccagcctgggcaacagagtgagactccatctcagaagaaaaaaagaatcagatgaacttggccaaggatatgatacatgagcttgatattctttgtgatacaatagtgaggtctaagtgtttgtgtttgtttggttggttgttttatttgtttttgtctgtcacctgggctggagtgcagtagctccgtcatcgttcactgcagcctccaactcctgggctcaagataccatcctgtctcagcctcccgggtagctaagactacaggcatatgctatcgtgcctggctaatgtttaatttttttttttttagaaatggggtctcactatgttgcccaagctggtctcaaactcctggcctcaagtgatcctctcacctcagcctcccacagtactgggattacaggcatgagctaacatgcccggccaatagtgaattcttaagaaacatttttagtgccttccagataagtaaataaagacagcagtgaatcgctttaaaaagatgctcagcactcatccattttataatagaaccaaaatgaaggaatggagctcctcctatttaaaagactctgcatttagctctgaggcaggaacgtggaacttaagctatgtccttccccgacgcccattccagaacactttggctgtggaggtcaagtttgtgtatgtgattagccgtccgaggcagtacgagtacaaactggctttctaaatatatcggttattgatttggggtaagcaagagttctgatagcaagttcagagagtgagggtcctgtattacccaaattatttatttcctgagtttgggatgattagaagaaagagattagatggcagatgttatctcaaaaatatccctaaatctatccagcttctgagtttgtatgtggagatttgggaggtgaggcatggggaatgagcaaaggcccggggagtcaccaggcagcatcagtggcttcctggggacaagtgagggctccggggtgggggagccagagaaagctttcgggaagacaagaaagagcacatcacatttattcattgcctgctgtgtgccacgatccacccgactccatgaggatgcgtgatgggatgtcattttcacgacagccctggaagccccggtgctgctatctccatgtccatagccgaatacagcaaggctctgagacactgacttgctccagtgagtagtggcagagccagcattggaattctgcttagcccactccaaagcagaggtttgggctggcttggaagtgtgaacagagtgcagaattgggaggagttagaagggttacaggagggtgttcttgcatcctgtgtgcatttgtccctttatcatggagtcaccaaaatccatgctctgccacaggagggagcatggcaggagcaacgggggtggggggcttgaggatcaaacatttggtctaggaggtagaccagtcatccacaggagcagcgctgcagggaggtgaggcaggttggggtgagtgcacagaggatgctaccgtctctagtactgcagagccaggagaggggttgatagcactgccctctgcctgcctcatttgggcagtggggctgctgctcccatcggctgcctgctggagctgctttctgcctggttttgggggcactggcgtggcttccaccgagagggttaactcccccagatccgcattttgtgttccctgcagctcacagagacacttaatcaatccttgttgaatgaagtgagtccggcaaaacacaggcctcacgctaagaaccctgctctctgtcctcctttgcacccaaacccatttgtctgggagccaggctgatttgtccagccacctgacacgcacttatggcacaccacgtgtgcccggctcagtgccagacccaggcaggacagtggagaaagaggggtttcaaggagcttgcagtgtggctccaaacccccaaatcatagcaaagtgtgaagtactaaacagtggagtgctgagtataattacagttcaatgccagaggccagtgagaaaacaaatacatcaataagtaagcataatcgcaaataaataaataagtaaacaaatcatttctgcaacacctactgtgtgccagatacaacactggtatttacgtgtcctcataggcaaccccccaccccagcctgagaaacttcgcagatggggaatagcatccttattcaatccttccacccatagatctgagcacctcctgggtgttcttggctcttgggatacagcaggaaaggaggccgactcggtccctgtccttgtggatgttgagtcttgtaaagacagatagtcgtcaaggaaatgtcacccatcatgatgcagaagatgaagggaaggaacagggcacgggggacagcaggcagggccatctgagcagatacttgcagatccataggaacagctgatccttagtgagcttgccccacaccacacacctgactctgctgagtgtctcacctgagtttaagcctcacctcagtttcacgatgcctgtgctattagcccaggtaaggaaactgaggcaaagtatgctgtccaaggttaactgggaggtagaagccaggcagtttgactttggggtccacattcctgatgcccactctgctgcctcctggtacaggagccagtggggctatggtgggtggcgcagggggaggaggcagggaggtcgtgggagaagacacatggttatcacccagatgaggcaaagtaactcctaggatgccaggaacagaggggaaattgtttgttttaacttagcaaaggctgtctaccagaactctggagcaaaggtcatttttatggtcggacttcagaagcatctccattaaagctgggaccaaggccagctgtctcctgtggctgtttttccagttgtggacgctgagtgcagagggtctgagatgtgcctgcggtcagggactgggaagtaccaagaccagaccaggttctggagggctgcagtggaaaagcaggccttgaggtgtgagctggtagagaaacagtgtcacctggtcttaagcaggacggggacctgaaagcaggaatagaatctaatcatggtttccaaaaatggttatcagttttctaaaaagcagaatccttcctttaaaccaagtatgacccaggccgaatgcataaacctgatgggcatggagctcttgttggctgatgggggctgtgtgggcctctggacttcagagacttcagagtcctgggggtccacagggctccatttgaaagccactggtttacagattccattgggagtgaggacagaagactggttttcaggtgatgagggcttcggtttagagtgatagttgagacttttagacatgggtaacagaggttaagagtcctgaggcaccccgagttttctggtctggaaactgaggaggatggagccctcatctatgaagagccgctgcccgccagggaggagaacagagcagtttcctcacttgctcattcggaagtcgaatgaagggtatctgagaggaaccagccagtgactgggttgcagggcgggtccctgaccggctggggcttcaccaagatcccagcattgtctgcacggaagagtttggctgaagtcttagtctcaggcatggcatggggcttggcacaggagacccattgcatgtggagtagctggacggacggacggaaggaaggaaggaagaatgaaggaggggaaggaagaaagggaagggaaaaggaaggagggacgggaggtggaagggagagaagggaagaaggaaggaaagtgggaagggaggaagaagggagagaaggaatgaggggagggagggaggaatgaagaaaaggagggaaggaaggcaagagaaaaggagggaagggaggtggaagggagagaaggaaggagggaaggaagggaggaagaggggagagaaggcagcaaggagcggggagggagggaggaaggaaggtgggtgggcagatggaagcgggcccgaagtgctaacagcagaaggcacctcaggaaaacatgagtcccgttaaaatctccgtcgacgggctgggggtatttttcacttggatgcttgacagggatgtggtcttttgtaaagtgacatgtgaatattgccatttactagtcttgtagcagtgggcctcagttttatcatccttgaaatgggaataatgatgcctcctctcccagagctcgtgtgagttcaaaggggttgcacttgccaagcgcctggcaccgtgtcagccccagtgaatggtaggggtgcggggctggcgggtctctgcctgcagccggccaggaagtggaccttagagaatgctgcaaggctgggtctggcccagtaaagagctccaggaggacggagcgtgagaatcaggcaggaactcattttatacttcggatcagcacaagggcccggggaattagctcttcctgaggacttctctggatcccttggagagcagtgatgtgccgactagagtgcaggggtggctccagtgaggggttggcactgcctccccgaggagccctgagcagaatcttccccctggccaggacgccctgcactccctgccctctgtgcagctcctttctccctgaggatttcaaccgtccaggtgttcaaaggcttctcccaggacaggtccagggtctccttcaagcccctgctcattgcacctaggaagtgattgggtccgacccaagaacagcctccttgctaagctgtctcgggcccacacaggagcccagagctctcagggcaggggagggatttgcccctcttcccagggcttcaccaggaatgcctgagggcaggacagggtggcagggccccggcagtcacggtctcttccacattgcagactgaggcccttcacctcctacaagctgcgcctgaaagccaccaacgacattggggacagtgacttcagttcagagacagaggcggtgaccacgctgcaggatggtgagcaacccggggcccagaccgcgttcctggccgctgcccctggagcccgagatacttaggccacactttcgtcttgagccagaaaggggccaccagggagtggtggaaagcagtagaattccattagtgacagacagctcggagggtttccgcacagcctgtggtcataaatcaaggtttcaagggcttccaaatggaatggaagtttctttgattggcttctaaagcccctactatccattagcatcccagaaattgaataattgatagggtcattaaaaataaatgtcagcgggtagctgggttttaagagattttccccatttttctcattcacgagccactctttgacaacagcgcaggtaagtgatgggaagcgaggtctcctcagagctccaggtggcgttttcagccgctccgtcctacctcggcggcgtcaggcctgaagatggattgttattctgtgtggcccaggcctgtggcgagcccaggaggcagctctatcagccgcgtccagcggtgatcacaggacgggtgggatggaaaagagtggatggtgggtaatagctcagctcccaggctggaaacccagtacttagttcacccagcagcgtttcatcatcattcccgcaacctatccccaaagcactgtcttttccatttaacgctccagtggaagaattttccaataaaccaatttccagctggctcaccctgtgacctcacatctccacttctgctctctcgatgacctggaagtgtggtttctcccacataggcctcccttggcctcagggaccagcagagggtttgagcaaaccattcccggcttctcagcaactcacagaggctgttttgctgcaaaccctgcactcccagcagagcagaacctgcaagagcctccaacaggccccagctgtgctcccaggaaaagcacacttgcccctggaaaagcactggctggcttctgtggctcctgcctctcatccagctcttttctgagcacaaatcctgggagtttattggagctttggggaaagccagtgagaaagagaggagccgtcccgggtatatggggtggtccagggccctagtgagccctgctgggccctgaggagccgggctgagccccaggagctcactgtccaagggtcccacatcgttagattcaaccaactgtggattgaaatgttcagaaaaaaagttaaaaatacaaattaaagatatacagtgtaacaactgtgtatttgtttggagagtgttatgaccttgtacaatttctagattactcatgagagctcctacaattataacattgtaacattgttatgtaacagtattacaaattataacgttgtaggaggactgatgagtaacctagaaatgatttaaagtatgcgggaggatgtgtgcaggttacacctagaaatgatttaaagtattcaggaggatgtgtgcaggttacatgcaaatactgcaccactttattgttagcaaacctggaggcaaaagctacttgtaactggaaaagcctttccggttaatctacttaaagtggggaccaatttcacactaaaccacaagggaaaggctttgcaggaactaaattacaaaacaaaaactatataaatgcattcattttaacgttacctttaacacagttgaggtaatgtttgcaactaagcactaaatcttagaataaagaacaaaaccccacacaagctgatgtcattgtcgtaatctctctgacagattgtgtgaaagcaaagtgcaacagcctcctttgacctccagggcagcatccaaaaggaccatttttgaaaaaaatattgaagggcctcttcagactccagaggcctttcttaccctttgatattcagattgggctttgatgcacctatcttgtcatcgccttccctgggatgtgcagtttctctttgcaatggagttgcattgtatttgtgttgtattgtcttacactatctagagattgacaggcacagactctctccaggggttggggaaccctcggcaagatagggagagtcctctgagtatgtggacggtttactgatgaacagtttctttttatagtgatttctatttccctgcacaacctcacaactcaaggacattgagaactccctgtaatggcaccgctgtatcaccagggctgtcaggaagctggctagagggcccaccattaagctggaaccacaggaggttaagggggttggagggagacccatccctaaaacagaacggggaaggtggaggtgtgactgatgcaggcactgccagggctgaggagggggtgtctggcaggtccagaggaaaatcacagagccggtgaccccgggacccaatcttgggttctaagtggagaggcatctgctagatgcacaagtgtgcctgtgggaagaacatcgtcattccgttcagtgaatatggactggatacagaatgcgtgtcacacttctgctgggcccccgggatcttacagctgggaggcataagagttcagctcaatatgccaagacaggaccacacagatttggagggagcagaggaggcagggaagaggggcacagaagacctcttggatgtggcagatgacaagaagtttagtttggctagagtgcagggcatggccataggcagaggtcaaaccagccttgtccctccagagagcagagcagaaccatggcagactccccttcacttcaccctgctgtcccagccagctgcaacctcaccagaaatcaatctcctttcctgacagccttttagtgtttcaaaccaagtgacctggcatgatcatgtgtcctattcaggaaaagtagctctcacctaggtatcttaaaaaaaagagaaaaagataagttcccctgctctcccagaagacctgagccctgcagggagggtctcgagccagagagctccaggacagcctcactggaggggtggctctcggaatgtccaccacagggagagcccagtctgggtctgtttctcggggccattgttaaggttggctccctcctatcccgaggacaggctttgaaggagaagctctgggaagccccgaggaagggcaggagaaggggacccctggagaaggaaggaggcagggctcaccagcctccccatactcactgagggtggccctgggaagggcggcagaacataacaaccaccctgacccccgctttcctctcctgtgtgtttcagttccaggagagcccccgggatctgtctcagcgacgccacacaccacgtcctctgtcctgatacagtggcaggtaagagcgcggggaatcacgcgcgttttgtcaaatgtgttctcatttccctgcgcattcagccacaacggctgacatggactgcaagctgagccctgagctaagcgtttgagagtagaaccaaggagacacaccctcagactcaaaaacgcgagggggaaatggtgtcaattatcatctcggtgtaatttccaaaacattagaagcaggactgtgatgcacgtagagaatgaacttgactccccttattcaggagggaccggcaggatggggaggccagtctgagagcgttggaggaactgggtatgtcttggcatttcaccgaggacgttggagcaaggcttctgtgtatacacaaattggttatcgccctacaaggcagtaaaactgcaaccgctggagttagcttttctagagaagtcatctgcaaccagacaaaatatctaccggattgtacatattttcccaaagtctgggggtgggtggtggtggtggtggtggttgttgttgttgttattattattattattattattattattattattattattattattttgggacagagtctcactctgtcaccaggctggagtgcagtggcacaatctaggctccctgcaacctctgcctcccgtgttcaagcgattctcctgcctcagcctcccaagtagctgggattacaggcgcatgcccctacacccaactaacttttgtatttttagtagagatggggtttcaccatgttgaccaggctgatcttgaactcctgacctcaggtgatccacccacctcagcctcccaaagtgctgggattacagacatgagccactgtgcccagccaagtctaggcctttaatctccaatgtgcagtgagttaaatgaaggcatattcttccagataatcacacactccttgttgggcctgctcagcaatgctccagtaaggcattgaaggacacgctgccgtctctttcccttagtttcaattttgggcaatgcttactgacaagtacattgatgacaaatataacagagggacaaaactgcccaaggaagggctgcaggccccagggagatcccagctgaagagtggggcggggagctgtgcggaggactcagcccagggcctgtgtagcccggatccggggcagacagatgttgagtttccccagggctagagcttggcctggcagcagacacaacagatggacaggcagggggccaagcacgagggcagagtcaaagtttctggcccacagggaggttcctgaggccagaatgggggctgctgtgccagggagctgggaacatagtgggatggggccagcatggggtgggtacggcatgaggacaggtcagcctgggagtgcctgctgggagctggggtcaggagggcagtctggtgggcacgagattcttccttggggctgaagctgtcctcaaggacaatggcagggtgcccgatgcagcaggtgggaatgatggttcgggaagtcaggagaaaatcaagaggggaacagtggtctagacatggccttggagggcgaggggatgtcccggccacatgccctccgccggtgcaggggaggcaggaaggggtcctgtggaaagtgggggctgcgggaaatggaagggatgctgggaaacacagccaaggccaccagtaggtgtcccagacagagcatctcccagggccctgcagaagggccactccaagggacagtggcttcactttgcagcacggaggatgaggtccaggaccaggctaggacaggaggtgccagagatgcctgctgggccgggagagagacgtgctgagtgagcagcgccagccgcagccttcctgggcatggtcttgaggtgcgtagtgctagagatgccagagaggaacccggtgagcagagccaggctgggctgtgggtggggccagccagggggagcttgggaggggctccgctttcaccctcttgctgtatgatcctatgaaatatgaccatgtttgaggtatgaaagtggcaatttatgtgattcaacctgatatcacttgctactgccacttatctgagggatggagagtaggcgtttaacaagctgggttctgtgaagagtgtgtcatctccttcaagtgtccatggaggtgtgcggggctgcgtctcggctgcctttctcttgctaagggatccagcttctctgggtaggataggaacctttccaggcaatgaaagaatgtcccagtgtctcctggtggaactggaagagcacttctgtggcactcagccctactgagtttaccagagcataggggggccagagtgggaaccacgaaaacagcctgggccccacctctgcccctgggaagccacagcccctgatctgtctgggagccactggaaaagtgacgaaggacccacccgcaacttgccatcgggtgactgtggccctgagaggcccctctgactccaggttcctcctttgtaagaacagaaggtcacaaaggtgagctcaggtctcacacaacatctccagtctttgggggccgctagacccccagacccgagcttcagccctgactcccgtgagggtctccggtgggaggttagagacattcaaaatggaaatgcaaagtcccaagtgctcgtttcccagcctgcaccaacacagtcaatcacaagaacattggcactttgtaccatgctgaatcctaccagaaaattcacattttctttgtagacgtggcggcagcctgccaataccttacctaggtaagctcctttcctataaaggcagtgagcatcagggctgggatgcgtcacctcctccaaacaatggttgtgaaggcatcacttgctgtcagccccagtggacggtgcagggctcgagctccccttggtgctgctggacagctcagggacgtgcctagtgccacctggaggagctgggctggtgtgtgcatcagccgtccccctccagagcccaacagaacaaactaattgcaagaagaccagagcaggaggtggtcaatacaacgtcctgtagaaataaatgcttgtcaactgccaggcaattgaagtataattaaaattatgagtaatttactgcattagaacaaacagaacaaagaaaaagaaactaggtttaaatatagatttgcattccaaataaaatgtttcacctgtaaaccttttgtgttttttgttttgttttgttttgtttttttagtaattactttaaaaatgcaaacacagggccagcactttgggaggctgaggcgggtggatcacctgaggtcaggagttcaagaccagcctggccaacatggtgaaattctgtctctactaaaaatacaaaaattagccgggcgtggtgatgggcgcctgtaatcccagctactcgggaggctcaggcaggagaactgcttaaacccgggaggtggaggttgcagtgagccaagatggcaccattgcactccagcctgggcaacaacagcaaaaccttgtctcaaaacaaacaaacaaacaaacacgggctgtaatttcaaggcttatagacccatttaaatgcctcccttagtagactgtcaggcttgattattcttagtaggacagtcaatccttgcctttcatgggatccagttctgtttgaaagctaaggagtagaactccttctgtcttccagggtggagtgcagtggtacgatctcggctcactgcaacctctgcctcccgagttcaggtgattcttctgcctcagccttctaagtagctgggattacaggcctgcaccaccatacctggctaatttttgtattttcagtagagacaggatttcatcatgttggccaggctggtctcaaacccctgacctcaggtgatccacccaccttggtctcccaaagtgctgggattacaggaatgagccaccatgcccagccttgtgttttcttttaaagacagggtctttccctgtcacccaggttggagtgcagtggcgcaatcatagctcattgtagcctccaactcctgggctcaagcaatcctcccacctcagcctccccagtgtctaggactacaggtgtgcaccacgatgcttggctacttcttcaaaaaatttcatagagatggagtctcactgtatttcccaggctggtcttaaactcctggactcaagcgatcctccttccttgacctcccaaagtgctgggattacaggtatgagccactgcccagcctgtaagtgggttttgagactgttttctagcaaagaaaaaaatcccaagcaattgatcacaccatacgggaggctctcagtgtaaaaggcaccttcccagaggagggttacatctgcctgggcaaaggcagggaggcatcccgccgcttcagaacacatcttggggctgtttctttttctcttcacttgtgccacccacagaggaccaacacctgcatggagtgctgagttccagaggggactgaggcaggccacagaatgtgaagagctttcattaagcgcagtgggctctttaaggcattgataggaagacagcagaaggaacgaaactaactctggccagaggggcacctgaatgcacttggcaggactgccaggcccctgcagtgaaaggctggagaagcgcgtggcccccggcacagcctgaggaaaggctcacgggtgacgtcactggtgtttgatgttgtgtctcacgggtattgcgtgttgagcctcctgtgctctcagaaccatcaggaccaaactccggagagaatccctgttctactctccacaaagcagaaggcacaggatggaaagtgaaagctcagatggtttcactgagcttccggcccgggggaccacggtggccggatcagatttggatttgggcacctgctctgcctgaactcgcaggagacagtggcacgtggttgagcctccctcagcccagctccctgtctctagaactaggagagttaggccctgccctgctgctcccctacctcagcagagagagctgggtgggaggttccacagaggccagcaacggcagagggtccgaggtcaccgttcaggcagctggaaggagagaggctttccctgcaggtcctgcctcctcctacccccaggccttccctccactcaactctgtggctccaaggtgcccaccctcctgggtcttccccagaccattgacttcttcctgcctcccctacctggtgataaaacccaggcacactcctaccaggtcatttgcatttaaacaggctcttttgctgtggcacgcctgtaatcccagcactttggtaggctgaggcgggcagatcacgaggtcgagattgagaccatcgtggccaacatggtgaaaccccgtctctaccaaaaatacaaaaattagccgggcgtggtggcgggcacctatagtcccagctactcaggctgaggtaggagaattgcttgaacccgagaggctacagtgagcaacccaggaggttgcagtgagccaagatcacaccactgcactccagcctggcgacagagcaagactccgtcttgaaaaaaacaaaaacaacaacagcaacaaaaaaacgggcttttgaaaaatgaagaacctccaggaggctgctggcgaatttctgaggcgtggcaggcacagggaaggtgttttgaggcaggactcccagttcccttcaagcttctctccacacagatggccaagccagggtgcagtgacacacagatgaggtcatgttgaactccggcaagtcccactccaccccagggctctgactgagcatccgccatggctgaggcctggcccaggtgctctgggcatttaaacatgaacaagacccgaacatggcctgcccctgggcatatgcagagtcagagacatgcgaagggctggggacacgggtctgtggtgcaaagcgaaccttttgtttccagtcatataatactctggaggccatctggccagacttctgcctgtcttgggcacagggttgagcctgggagtttgagcagtcagcccaagcttgtactgcaaggtggctgcaaggccacgacccaaatctagagcctgaccttgacctcatgggttccatggagccgccctgctgatgcctccgagcacctccggagttggagagcctctttcacagattacagacaggttaatcccaaagtccaggaatggaaaatatggttgaacccagttcagaaccctgtgcaggcaggcccgggcatctctgtgaagccaccggaccctttgtaagtgacgctcccactgggaagatgacacctgctagcagagtggcctctgccagctgctgccttcaaggaagccaccctctgggggcacggccgcctggaccccctccccaggcctggaagactcctgccaggagcggatgcattttgactcttcagtgatttctggtgcaaacagcatcagttagcctgttggccaaatgtggccccagcccggtggctgacggacactgtgtctgttgggcaaggcggattggccatttcttatagctctaaatcatctcattcgcctaggctagaaatatctgtgagtccaggatcagtaatcttcggccccttcccctccatcttccagccccagaggctgggaaaccacacttgggcccagggagaacatttttattttcccaacctcctaacttcctgcttagttgatagttttggtgaattgaatccagccttcgtcacgccacctgagcttccctcctcccccagaagtaaattgcactctctgtaatcctgtcttgtctgtgcatctgcagagctggctgaaggcctctgcagtcttccttctgaggtaccagttcctcgagctgctgcaggtctattctggggcgagagggaggctttgaaggtgacctcagggcgaggttgcttggctggtacttacagagcccctgctgtaagcttttgatctgtctgctcgcctcttcgtcatgctgatagtcagtccagagcccagaaatggaagctgaggtctctcatcttcactgcccagactccagccactcccaccccaccaccagtgtgaacagcaaggacaggactcccagcaggaccgcctgggaccatctgggtggaccaggagccttgggcaaaacaatccggctctctgggtgcgcaggcatgtgctgggtgagagccattagcggggacctgttgctgtgtggttgtcaggggcccaggagaggaaagtcagaagcccccagggtcttggaagtcactgccatctctcattcagcaaagggctcctgtcagtgcatttttgcaagactggttgttaccgggagtagcagtaacccaggaatccaccaagcccatccatggctccggtggattggaggaagctccgttctggccagtctccttctggggagcccacccaagtggggaatgacccggcacttgggctagtcctggctcaggcactgggaactgtacctgtagcctggctgctgctcctagacccacccagacctgcccctgcccttcatgcccctcgctcccgtctagtggggctacaccaggcactgtgcccgccttgcagagggccagcccttctcccctcatcaaaagccgcctcctcctccaagggcagctcaaacgccattccctgcagttatcctccagttcttcctggcagtgagctcgccgtctctgaggcttcagagccgccttcctcactcagtctctggcacccggtgcactatagctcaggagatctcctagatgcaatgagacggcaaggctggaatatattccccaaggggcggagctcagtgtttgcgtgcattcctccagtaacatgccctgagctcttggtgagtcagtgtgaggagacaggtgcagcttttcaaggagccacagcaccaggccttcctggtggctctggcactgccctccctccctgcgggagggcccctgggcacagagctctcctgcctcccttagagccacctctttgcagtggcccgagtcacacaggacagatgcgctgtattctttagggtcagcagaatgaccatggaaagcaaacggccatggagaacacttccttggggctcagtacagaaaccactctgtctcctctttctgaaatccagatggcctgcggagaattgcctctcttcagtctcacataccgacttttccaacttttccatccattgtatttcttctaagaaggttaagtaaaccttctatttcattgtggctaacagttgtgtttgaagaaggatgccttacagaataagggttttaatttcagtctcagctgtggcccatgagataaccagggctagagtttgaaagagcagactgcaggatcacctaagcccagtagttcgagaccagcctgggcaacatggtgagacgtcatctctacagaaaatttaaaaattagcctggtgtggtggtgcaggtctgtagtcccagctactcgggaggctgaggcaggaggatcgcttgagcccaggaggtcgaggctgcagtgagctctgatcgcacccctgcactccagcctgggtgacagggtgagatcctgtctcaaaaaaaaagaacagaacagactacctggaacccccttgtgtggtgatgtgagtggatgtgcaagtgtgtgtgtgttatgcacacacaggatttccaccacgcccccacatctctggtggtgctttcatcacgacactgtcgggagccagattgcagttgcatataatactgaccggtgcccactcctagcacaagggactaatttttaaagactaagagtaaaacaactgaaaacctaaaagctgctctgaatgtgattctatagactccacagggaggaaaccgaacatgaaccccatcaacacccccagtttttaggagactgtctgacatgcccagccctaagggatggggtgcagagcaggactggcggcccggcatgggggagctggagaaagagcaaatgagcagcccaggacacctgtgagtgactgttgccggcgtcccaaacactgctttgtcgtcaaaatcatagaaaaggaaaagagcatttagtaaaatcagcaggcactgtagcctcccctacctgttcccctatccagcctcgactgtgcctgtaattctcactccttccttttctgccagctttcagcttcccaaactcatagctccctggtcaggtttggattttattgttttcctggcaagttgagtagtgctgggaactccttgagccggtgaaggggtgcctgctggagaaaggggtcagtggccacagggtgtggacggatggggtggccacgtgccccagggaccctgccgtgccttgctgatcgtctgccgccgcctcgggtacaccgcaccctggagagaccctcatctgtgctggctcactttctgctttgtttctctagctctattactggaggcgctttgaaaagcttttccatctgtagattgtcccgatggaaggcaagcagcgccggggagggagcgggtatccagagaaaacctgggatgcccagttacatctgaattccagaagaatcattttcagattctgatttagctgggtgtcttgtttttttatagctttaaaaaaagcaaaaaaatcaagagagcctcatttgacattgaagtcccgggctctggttcggcggttctggcctggtagctgagcatgctccagccccgtgaaggcggccagccagggccagagtagagaggctggagcagagccggcaccaaggtcccctcatccactggtggtggccagtgaagggtaaagagagaaaaggaaaagccagcagaaaaaaagtccctcccagataatagcccaactccaccgtccatttgagaatttggagctagatgccgggcagtgccatttccccatctctggtctgtggtgggcagcgggagtcctcggacctggggctgcaagcccgcaggatggatacgtgacccttgtaactttctgcaaaattgaagagggctgtggggcattgacaagcacaccgtggggggaacacaggggactcagacgcgcccccacccccagacgacagctctctcagcccctgggtttgctcactggggtccgacacccctgggccaggagcggagctgtgtccaggctggagtagtgtctaagggtgtgggtttgcagggcctctaagacacggatcgcaaagacccagcaaggccactcagttgttcccgttatgcttttccgcgtctgaggggggattatatcccgtcgtgctgttcctgaattgggagcatcacaggggtgtcagaaagtcctcagagagggacagctgctggcagccctgcatggcagtggcctgggggctgcttgagctaatgtggtagcaggcctcattttggaaaacctcctgagtctgccgggtacacacggtgcccctctggcatgtgcgtgtcgcatgctgcatgcgtgagtgttgaacgcgtgagtgttgttcctcgttgctaccacagtgcaagcccccctcactatccaagccattctgtcggagagcctggggagcaaagaacaccgcttcctccacgtttgggttttgcctcgtgagtagcaagagtccaaagaaaaagcgatttctctaaacatccaacccctcctggtgcctgggttcagatagtgaggaccagagagagtttggattgcaaggatgtgttatttaccgggggcagcaaaacaagttactacgcattaggtggttggaaagggcagagccttattctctcacagctctgggggccaaaagtccaaactcaaggtgtcggcagggtcctgctgcctctgagggctccagggaggatccttcctgcctcttccagcttccggtggccgatgacaactcttggcgtttttcacttatggacgcgttactccagtctctgtccctgtcttcatcgggtgttccccctgtgtgtcctgtgtccaaacttccctcttctcataatttccctccactcatcaaattaggaccctcccctaatccagtatgaccttgtcaaaaccaattgcacgtgcaaagaccctgtttccaaataaggtcaggttcacaggcaacagggcttagacttgagcgtgtcttttagggggacacagttcaacccacagcaaaggggctctcgtgcagcaaagctgtggctccgcccagggagcaggatggtgctgcggtgtgggtgcctcacagtgagcccgacaccggaagttctgtgcacatccgtcctctgacgaggcttcgtggcctcgtcttcagccatcttctggtcacagcttagaaggttcctgttccttatccctcatctgagtatcccaagaagagaccagatgctcggaggctcagcacccagatgagtgcagaagtcactgaggctttccagggcatccgcctggagtgggaggacccttctcagtctcagatttgtctcctgcgtggaaacatcctccccaaatgtacttataaacagaaaccgactgaaggaaaaggcaagccttgcgctgggtctcgagtggtgaacagccacatcctaaagtggacaggtcttgaggtctcataaccctgtgtttagattccagcaagacctgaaactccacttccttatctgcctgtgctccctattccatgggagtctaatgtgtgtctaatgagcgcctagccatggcttggtaagaactgcagggtgagagctggatggcaagggtgtattgtttgcctggggcagctgaagcagatcaccggaccgcaagatgataggccaggccagccatcatgcgaggggccatggggattccagcctgaggactgagtccggcacagtggggtggcctggcatggggaggcatcagtgaggggtacagtacggcagccacagcctggatggccaggggagtgagggagggtggggtcagctggtgggtgcttcagagcaggccgcctctcgaggttccaccctgctctgggctcaccacacagcacccagcctcctcgccgtctgtgtctgtccccagcctcctgccccagcctgggggctcatttgaggatttgagctggacaggggtcaaaatgctgatgtccccacacacatgcacatgaaaactgggattctgagagtatctccacagcttggtgctgtgccctgggagctgcctgggttcgtcttgatgaatctgacacctgtcgctggaacccacgactttcttctgtgcagctggctagttaaacaggggtggaggtgagccctgctgcaggccagctgggttgactcccatggtgtggctgagtcggtgtgatgtctttgcagcctccgagggacgaaagcctgaatggccttcttcagggatacaggatctactacagggagctggagtatgaagccgggtcaggcactgaggccaagacgctcaaaaaccctatagctttacatgctgagctcacaggtgagactgtcccctctgtcctggtacagggagggaggttcccaggggacccttggtatctgctcagtgcacatcatggtgggaaacgctgtggaagaggctgagagaagaggcagccctgccctcaggaacagggagcaggcgggtttacccaccaggggcacacagggtgcaggtgtgcggcaggtgggtgcagctgcggaggcagaggggccttgtctaccacagactgtgttaaggggagagcagttgccaggcctccagtgactgcactctaccggcgtcagtggggaagggctttgggacctgagatggaggcagggggccagtaggaacctgttgcaaaacccaagtccagggacaggccccgcctgtctgtaccagacagcctcagcgtggagcccatggtgctcacccccgggctgattttggctctgcctgcactgcgccatgatcgttgctctgacgagggcccagctgccttcaagacagcttctagaaccctggagagggacggctgccctgcccgttcccacccctcctctgttggatggaggttagagggggttcatttcctggcacccaccaaacggtgtcacaaaaatactctttgccccttgacatcctcgtgccggggacagagtgaagaagcagctccagaacacgccgtgtggacggtgccctcccgctttctgccatccctgtggcaccagggctgcctacctcacgcgccaatgccagccgcggggccttccacgcacccagtgcgcggacggcagcagctcctatgctcctatgctcacacagcttgaccccagtacagcgccaggcatgatgttgatgaatgttgaagacgggaaattgcagcactggtgtctgcactgttggcacaccccaaaggtggcccttgctgaccaccagacagttggcatctccctgggctctgtcgcaaaatcaaaacagcacagtagaagggccccgggatgcggctgggcttacgcacctggtcgcgcagctctccctgaggtggtttgctcggctcctccagccggggctccctgcgtgagcatgagtcagctgcacctgccccggggtgaccgggagaaaaggtgtcctgccactcagtgctaagttgtgccaaaaactagcatgtttcactgaatcagagtggtaagcacaccccgcctgtccgggactggggtgccttgttgtttacgaggaggtgcggcagcccccgcaactgggagctggtggaaagcttgggcggtagcggggtctttattgccccgggaggcgcagcgtgggaagtggctggcatcccagtaaggcacctgtctcccttgttcctgccgcacatcacctgcgatggccgtgtccctgcgtgctaaccacctttctgctttgcttaccccaatagcccaaagcagcttcaagacggtgaacagcagctccacatcgacgatgtgtgaactaacacgtaagtgcgctctcagcgggaggcccatgccgcgaggcgcacacactgtgcccagagccagctggtctctcagtgcaagggaaaaccagcctggattaatggctccagttctggaatcgcctctcaaacgctgcgtctccacataccaaaccaccagggagataggaaaagaagcttctagaaacagaggctggggaaatttactaatatctggtcttcaagtttgggacagagaggaaagccagatagaacaagatctctgatctctccaacttccttcttcctttttttttttttaaagaaacactcttttttcttttcttttctttacttttttttttttttagagacagagtctcactctgttgccgaggctggagtgcagtggcacgatcacagctcactgcagccttgaactcctggctcaagtgatccccctgcctcagccccccaagtagctgggactataggctcatgcaaccatgcctggctaattgtgttttgttgttgttttttaagagacgggttcttgctatgttgtacaggccggtcttgaatgcctggactcaaacgatcctcttgtctcagcctcccaagatgctagggctataggcgtgagccactgcacccagcctttctttttttattgtggtaaaatacatataacagaaaatggaccttcttaaccatttttaggtgtacagttcagtggcattaagcacattcacactgttatgcagccgtcaccatcattctccagaactttctcatcttcccaaactgaaactctgtccccattaaatactaattcgttatacccctccccaccagcatccacattcaactttctgtctcgacggatttgacgactctggggacctcatagaaggggaatcatgtagtatttgtctttttgtggctggcttgtttcatgagcttaacgtcttcaaggtccaagcacgtgagagcaggcatcagaatctgagtcaagactgaataatatcccatcgaatgaaagaccacgttttgtttctccactcagcctcccttcaccctttcaataaaccacgttgtttctcctttgattcccagctagggaggagtttcaaaatccaactcaagggctagacgtggagccataatgtgatcgacttcaacacacagaacttggctggtttgggaagtggaccaggcaggagggaggggctggccctccccgagcctatgttgtgttcaggcattctgtaggggtgggagtgatttgcagggcagcacagctccaacatgttgagatactgactccatagcatgggtggaccctgtaagcatctctttgaaggcagccgtccaaggacgggcgcctgagtcacggaagctttgctgggctggtagctggcaggaggcacaatttgcaggcccaagcacaccaccatccacaccagcacacaggtgccaggcacacacatgggacctcggaaaagccaagccacccacagagcagtgttaaccagtgggagaaccttccagaatgttttggcttaaaggtcaattattctcaccctgtcacttagtgcggagctggtgcttggccccctgccctaaggagttctctgtgtacagcagcccacgcccgttctttcccaggacacggccgctaaggtctcagaggcctttggttaccagcgtccttctacattctattttcaatgccacagtcttactctatctgttcataatttcaaggagagattctgaaccaaaaggcaggcccaggttatgttatgtattctaactcaggggtctccaaccactttgacaccaggggtgggttttgtgggagacaatttttccatagaccaggtggtaggggatggttttgggaggattcaagtgcatcccatttattgtgtactttatttccattattagtacatcataatatagaatagagtgaaataattctacaactcaccatcacgtagaatcagtgggagccctgagcttgttttcctgcaactagacggtcccatcttggggggaggggagacagcgacagatcatcaggcattagattctcataagagtgcaaaccctattgggaacagcacgtgcaagagagccaggttgtgcaaggcataaggagcacgcaacctagatccctcgcacgcgcagttcccaatagggtttgcacttctgtgagagtctaagctgatctgacaggaggcagaactcaggcagtaatgcgagggatggggagcaactgtcaataccagtgaagctttgctcactcacccgctactcacctcctgctttgcgacctggttcctaacaggctatggctagtggcccaggggttggggacccctgttctaaatcctttactttagaggagggagctccgtgctgcctcttacctgaacacaggataggatgggtacgtcttttgcttaatggtggtgggtgcttagttaataggagagaaggagggtgccccggtcacagtggatgcaggtatttcacagatttctaacaatcccgcctcctctccttggagggtgctccttgcttcattgtggttcatagggggaactttggagaaagagaaggtggtcctggtggaagctgatccatatttccttcaaccctgcagatttaaagaagtaccggcgctatgaagtaataatgaccgcctataacatcatcggcgagagcccagccagcgcgcccgtggaggtctttgtcggcgaggctggtaagctccgtgcacccccaaccccactgccagagagggccacagtggtggggacagccaggcacgctgcggccaagcccctcaggtgtccagcagcgttctttctccttgaacacattgctgtcggggctgaggtctccacgccactggcagggaaagatgggctcagctgagagctggaatttcctgacagcttcagtgaatggtcaagtcttgcttttgagacctaaagggtttgttcgatacctggggccatcatatttactgtggctttgctctacgaaagtggtattaagtcagtggtgatgtaggtgtgtgggaaatggaacctcgttatctggaggggcagatgtttgtatctgcatgggtccttcagtgggcttcggcagtggcctggtgacagcccattctctaggtctgggagagccatgtgggccattgtctccaccccttttagataagatgtgactgttgggtctgattcaagggaccttgccttctgtggggctcacagtgggaagcaacgtctatttttagatcagatcctgtccctatccctctccgggcccagcgtgccgcaggtaatgagagcaacgccattccttcggccaaggagaccacagaacctcaccctcctcgctggctggtgactttaaagagttccctgacttcacatagagcctgatgtttctgctcttttccgctggtgcagatttagaagggtgttgtttcaggcccggaataattagagtgtccctgaggacagaggctcggcctagcaggagctgctgcatagtggggagggtgagatgggggggcaggggcggctcggactgcgggggccagaggagggaaacacatcaggtgaccttttgcaattgggaagggttattgttatgaaccaatcaatagcaccaagggtcaagcccagcggattttttccggaatggtcaagcggtatttgcatacaaatgaggatgcgtggagagaggcatcaagagcatacggtatttctgcctctctttgcacgaaaatatgttcaaaggggtcactcagagccaccgaggtacggctcagctttccctcagggatggacctggctgtagaggagcccattgagggccatggtggggccaccaagggtgctgtcagagaggggtgccagggtgccgtcagtaaagggtgggtgccactgcggacggcggccatggcagattctgtgctctccagttgtattcgggtgactgggccccagttggcccccatggctgggggtgggtcagcctgtggcatcgggggagcacaggaaaggagggccgggaactacagtgtctgaactgcaagcagaaggtgtgggtgtcagagctctgcctgagggtctgcctgcgcctgggcataggacaccaggaaccagggggctcagggcacttgggcaggccctgagaccgaggcagacgtccagagaaaagagcttcagcaagcggtagggaagccaggggtggtgcgggaaactggggagtcgcgccagggccagccaagcggcaacaggactggatgcccagcaaacagctccagctctatgcccagcgcccagctccagctctatgcccagcgcccggctccagctctatgcccagcgcccagctccagctctatgcccagtgcccggctccagctctatgcccagtacccggctctagctctatgccctgtgcctggctccagctctatgcccagtgcccggctccagctctatgcccagcacccggctccagctctatgcccagcgcctggctccagctctatgcccagcgcctggctccagctctatgcccagcgcccagctccagctctatgcccagcacccggctccagctctatgccctgtgcctggctccagctctatgcccagtgcctggctccagctctatgtccagcacccggctccagctctatgcccagcgcccagctccagttctagggtctgcgctgttggtgtcttagttccttctcacactgctgtaaagggacggggtaatttataagaaaagacgtttacttggctcacaattctgcaggctgcgcaggaagcatggtggtctctgcttctggggcggcctcaggaagcttccaatcatggtggaaggcgaagggggagcaggcatcccacacggcacaaacaggagcaagagagcgcaagagggaggtgccacacatttaatgaccagatctcatgagaactaagccattcatgagaaacccacccccacatccccatcccctcccgccaggccccacctgcacgttggggattatagctcaacatgagacttgggcagggacacatccaggccatataagtctgtcatcgtggtaagatgcgtataacatggaaagcattctccgtgtgcagttcagcggcattcaggatggtgagcagccatcaccaacatccatcgctggagctgtctcttcttcccaaacagaaatcccatacctatgaagcaggcccccttttccctcttttcccatcctgggcagcctctcacttactctctgtcactgcaagttcacctctcgatacttggtacaaatggagtcgtgcagtgcttgtcttcctgtgtccagatccttgccctcggcgtgaggtttttgaggttcaaccgggttgtagcagatgtcggaattgccttccttttcatggctgagtaatatcccattgcatgcatttaccgcatctggtgtgtctgctcctccagggatggacactcgggggccttcccccttttagacttgtgagtgtgctgctgtgagtgtgggagagcgaagagcttttcagcagtgcagagctgagacagcccaggtgtggggaggcagttgcagaggctacaggtgagcccggcctctgaggttagcatcacggtgtgatgtggcttctcccttccccactgggcccccatctccctcccctcccaacatgtgcatccctgctccagccctcctttccagaggcctgccctcctgccccactcctcctcaacacacccacaccctccacgtgactcacctctgcccagaggcctgggctctgccacctgcaccctttgcagtcccacagaagggaaaggaaagcctacttgctgtgcccatgccaccaaggccttttccatgcacacacacaaactccacgtggccacactgcactgctcacagagctcgaaggcgggtgctgagagtcagcagagccggttcccacagcatcacacccacccagagtgccctgtgcagcccctccagtttaacttggctgaggcctgaagcaccctttatgcatcttttttttctttttttgagacagcgtcttgctctgtcacccaggctggagtgcaatggcatgatctcagctcactgcaatctccatctcccaggttcaagcaattctcctgcctcagcctcctgagtagctgggattacaggcgcccgccaccacgcccagctaattttttgtacttttagtagagacggggtttcaccgtgttagccaggatggtctcaatctcctgacctcacagtctgctcaccttggcctcccaaagtgccatttaggcttttatcccctgaggagcggctgccactgccccaggacaccctctctgtccccctccctctaggcggggctcagatttcccctctgtgcggtatcctgggtgctttgtgcacagctctgccttccccccagcagcggggctgccttctctctaatgctgctcctccccattagaccaaggctgcttcatcccaaacagctccttgccccaggggtattgccagaggggatcagaatacctttgtcattcgggcaaattgaggttcccaaacttccacagggcaggagagcagctggggaaaccctgcacccagggacgtgtcctggagacagggcctcccagatatgctgagatgaaggcaggtggaatcagtgtctcatagcagggctgcagggaaggctaatcagaagctcctcatcctgagggagaggagggagaaggaacctatggtctctgtccctgtaacagcagataacacagtcaccatctgccgcccaggcactcatgttctaagctggtctttccatggggctccttcctgaggctcctggcagtagggagggagaggcagagctggtgagggtgcacaggctggcagaggctgtgaggccactttagggccctggcagatggggagcagtgccaggagccggggttcacacaagggaatgtaaccgcccagcaggctcctcctgcctgcagcacagacaaaaccagttcactgagcccatggtattgcagtcaaaacagagtttaattagagcccagccacatgggggaactggagttatcactggtcagtctccctgagggctcagaggttagttttttccaggatagtttggtgggcgtgggggctagggagtgggtgctgctgattggctggggatgccatcacggggcgtggaaaacggtcctcatgtgctgagtccacctctgagcggggccacaggaccccctaagccgtgagtcgtgagtcatgagtccagatggggtcagtccattttcagaatgcaaaagtctgaaaagcatctcaaaagatcaattgtagtttctataatagtgatgttatctttagaagcaactgggaaagtcactaattttgtgacctctggtcacatgcctcctgagcagtgagggattacttacccagcttacaggctgggtgcggtggttcatgcctgtcatcccagcactttgggaggctgaggtgggtggatcgcgaagtcaggagttcaagaccagcctggccaacatggtgaaaccccatctctactaaaaatacaaaaaattagctgggcatggtggtgcatgcctgtaaccccagctactcgggaggcggaggcaggagaatcgcttgaaccggaacccgggaggcagaggttgcagtaagccaaaatcgcaccactgcactccagcctgggctacagagcaagactccgtctcaaaaaaaaaaaaaaaaaaagaaagtatgcttatattttagccgagttcaggcttctcccatactcctaatctctcagccttttattagctttacaaaggcagtttccacccccaaacgaggagggggattggctttagggaaggaccattatcagccttgctctaagttaaactaaaaagtaaattcctagacacggcccctgcatccaggtctctgctccaccccacccatcagatgtggcttggctcttgcacacccaaaacaactcacacatctcctgtgccaggcctggcagtgccaaccctgcaagtggacatctcagttgtttggcctcagcacactcctccgggttctgtgtttacactgcagagagttttctggaaggagaaagccagttcgccattccctttctagcctctgcttctcgcagcccaagtacctgcattgtaacaaccctaatctgctgaggagaggcactgctaacgtattgacttagagcaagtaggccttcagaagaggaaattaaattgggccagcttccgtcccctcggctggaagcttcagagcaccacaaactcgtgggcccgaaatgctcaaaggcttttatgaaaactaagactttgctgtggtcccataggtaagcgtgcaggtccaagcgtcggctctactgtttactgcctgtgtgaccacgggcaagtcacttaacccctctgagtctggccttgagaccttgtgctgctgtggggagacctgtgagtgaggagactcaggtactggcttcattgctgccactaaggcaccagtcctgctcataagatgagtgtccagaatgtacctggcccggggtcagcccccagtcagtatttggtgaatgagggggaccctgggtgagtgagtcggtttgtctggcctcatctgtaaaatgatgaaatgttcagaatagatgatctctgggtcccctgaagttcaaatacgtgatacttaaatctgtttaaactcagagaggaaggataatttttagatttttagctgagattgatgcacaagcccaggcactacaaattggtaaaaataatccatcggtaaggactccagtgtgcaggaggtaggacccaacgccaacaagcttaagctgaaagaatcattattaactcctgcactggaagagttgcagagcctgggacagcttcaggcatggctggatccagcgccccagcaagctgctccatgtggcctcttggatccactttcctcctagttggctccttccttggtcaggctcttcatcaaggtggccatacagccctgggcacagagagcttcccttttctgcagtggaagtccactggctgtcttcagcctgcctttagttgcatatctgtccccaaactagttgctgcagccaacgtcctgaggtgcccaaagccagggagatgtcatctctacctggaccacctgggccaactgtgaagcgagagggtccctagaggagatccagtgcgacagtcagaagaaggggactcgggcattcaccaccacagctgtcctgcagtgctgataggcagagtttgactaggtggccagaaatttttctggtggaggtatggacagtgtctatgggttcctcagcaggagagctcttcagatgacccagccagagttctgggcccagctccacattccacagcgttccgggcactgtgggaccacgctccagccttcaagacactcactattcatggatgggccctggtctcaggttaagcctgcactcctgcccagaccccaagcaggcatctcagcccctgcctgtatttccagagcccccaggcttccccctccttgagtatgtgccccctcatccataccaagctgtttccgcctgggatgactgctccctactcccgtccctgggaggacagacagtcctccctcccatgcagccctgcatccacgcgagcccttggatggggcagctgtcttctctttcccgggcaggattagctgtttcttcctctgctccagaacatgccacgtacacagctctttgcatatccacctgaggacaggtctttttctctctgagttccatgagggcagggacccctcttatccccagaacgttagcataaggccagaacatagaaaacattctgaagatgttagaggaagggtgggagggagagaaacacatttagacaggaaggaaggaaagaagggagggagggagggaggaggggaggggaggggagtaacaaacatagcccaggccaccggcccagaagcacaagtgactgagtgacccctgagctctaaggggggatggagcggctccagggcccagggagctcagggagggcctaaagcaaggcttcctgtccagaggtgcccggcccagctctcctgtttgctctgcaactactgtcctttcccaggagctctaaaacagttaaagctttaaaacaaaacgaaacaaaatagcaaagctggcctcacacaccaaacaaagcttgtggttttctgttcatttatgaatccacgctgaccgaaaactgattcagccccagatgtgtcgtggggacactaggggcagtcaagttctacccactttgccctgggggtcctggcacagacaagcatggccgccagcccagctcccaggaactgcaagagcaggacctcctctcctggagcagggccctccgacacccaccccggctgctgggacccctcgtgcacctttgttatccccagggtcgctctttagccagagttagtggcagctgccccaggacagagcctccaaataaaaagaggtgctgtgtccccacataggccgcctccttggagcctgtggcctcgtggttccctcgacccttagctcgtccccggagccggctcgccttccccacctgctgagccctgccactgatggtttaggtcactcggcggtcctgggggcttctggggcctacagctgggaagctgggttggggtgaatcaggaggaagggctgccgtcaatgagtagagccccccgctgctccagcttcctagggagagaccagaagcccccagcccacctcactaagccctcaaatgctgtgagcatgcctgctgtctgtccagtgagtctaggaggtgccttggaatctcctgggcccgtatagacagtgcgggtacaggcatggcccttctttggggaggaaggcgcccctcctagcctcctcctccacgggccttctccagttcttgccctgtgctttggggtctagtagtggccagacctgggattgccacccctggcatctgtagcctccttctgggggctgcaagtagtaggggctccagcatgtctacctaggaggggctcaagagccacactgtggttcggagtggggcttgggacccatcttgactgtgtttgcagtgtgggttgtgtgcatgttgggtgtgttatgtctgtgtgagggactgtgagagaggacaggtgggcttgctgctacatgaggcacgggggccaagtccagggatgaggcagggggcacctgagggagtggggagggctgggtcccatgtgggggtaaacctccatagttaacccacggcattattaccattattttccatcatccaatacatttgcacaagactatgggtccagcaccttgctattagaaatgaagctactctgaacactgttacaaatcttttccaacgtctccaatgcctgccttgggataaaacgctagaagcagaacttctggtccaatgacatgaacatttttcacctttgaaatacttcagctaattgacaccctgcagcggtgaccagatacagggctcaggttgcattcctctttcctcctgcttttaaatctttcctagtttattaggcaagaaggtatctcattattattttcctagatgggcttttaaatgactggtctgtgattaaatgcctgcagagctcatggctattttttgcatgggggtctgttacaaggtaaactgagacacaaaatgttagaagagtttattcgagcagacagcaattcatgaatcaggcagcaccagtccaaaggtggtttggggttctgggaagggaacacaaggggaacgtttttatggtgtgaatgtgggagctggacaaagaaaatacttgataagagtatgttgttgccttcttcagtctcaactgttagaaaattcctagttgtattggttttcatgctgctgataaagacatagccaagactgggtaatttataaagaaaaagaggttgaacggactcccagttccacgtggctggggaaggtgaaaggcacgtcttaaatggtggcaggcaagagagaatgagagccaaccccttataaaatcatcagctcttgtgagacgtattcactaccatgagaacagcatggggaaaaccactcccatgattcaattctctctcgctgggcctcttccgcaacatgtgagaattatgggagctacaattcaaggtgagatttgggtgggggcacagcccaaccatatcactagctgtatatctgcctttagttgcatatctgtcctcaagctagttgctacagccaacgtcctgaggtgccctcagtaagttgttggcggcttctgattggttgggcttaagttttatttttctttaatatgggcatttacaagaaatagcccaggttaagttttgtttaggtttgcagaaccagcaaggtcaaggttgtctccacggcttaatgggctttgctcaggggattctcaagcctggtctccattttattttaatgggtcttagtgttttgtgttgatttcttagagcttcttatatattagggatatcatgtttgatcatgtctatggcaaatactttgtctttaattttattgtgtttaagtggttgtgtgctcaaacctccatatctgaggcatctctccttcccattttgagaccaagtaaatattcacccagatattttttcataattttcatggttttatgttttccattaaactctttcatcaaaaaaaaaaagaaagaaagaaaaaaaaaactctttcatcctcctggaattaattctggagcctggcatgaagtgagcttctaaatggatcatttgtttccagagaagttttttcccccgaaaccatctattgatttttaattgctttgtggtgcgtcttaatcatggtttaaattcttacacacagtcaagtctgtctgaagacattccttcgttccacagacatctttactgttgccctagtacttctaaagctttcatttacatcagtttgttacacatttttttcatgtttaggagggcttgtcttattcctctttgttttctaaaatttctcagccattctatgaattttacaatcattttggcaagttcttaaaaaaaagcaaatgctcctgggattttgatggaaacgtattaaatagtaaagggatttggaaatcctcgccgtcttcctccttttcgtctattcatgcttgctcccgggagctggctgtccctctggcacggtgctgctgggctggcagcgctcctggtgcaggtcctgctgttgcttgtcaagtcattcctggcagttttattgcggcggttgctgtgagcctgggtattgtaatggctcgtccctgctctgcccaccgccaatcgcagctcaaggctgaggctcacatggttactcaggcatgttaaatattagtccagcaaaaagagcaacataggttttccccaaaaagcgagccaggacttgccttttttccacacccaatggggagtggctgcccagctcagatgagagccgagtgtccagcactgtggcctttagccccgcaactttcaccaaaaacagaagacagacagatacccatgctcagcatttaaaatcactcggccggccaggcatggtggctcatgcctgtaatcctagcactttgagaggccaaggcgggtggattacttgaggtcaggagttcgaaaccagcctggtgaaaccccatctctactaaaaatacaaaaattagctggatatcgcttgaacccaggaagcagaggttgtagtgagccgagattgtgccactgcactgcagccatggcaattgagtgagactccgtctcaaaaaataaataaaataaaatcagttggtggctttaggtggtgtttggttgttcctggtgtacatgtggctgtggaagacagaaaagtgtcttgaaaatatctgtttgctgtttttaagaatgaaaaaattgtcgtacaatatgggtcccacctttcttctaagtgctccaagtttttaattacagttggttggaatgagagaaaaaaaaaagcacagcttctagctgtttcagctcccgctagtgacaaataaagccagtcctagtgcctattaagtgaaattaaaaggcttcagtgacgccagtttgaaaacatgtgtttgtagggaagagtgaatggcacctgtttacagggtaattaacgtcgcaaccccgactccacaggctgcactgtctcatcatcgacgttcccagggctccctgggtaattattaacatatcacgcgataatgacattgtgcaaaccacaggccgcccctgtcatttctgcggccacagtctctccaactgatgccggtgggctgtgctgcgtacagggctgtctacacggtcctggatgatggataaacatctgccgaaagcctactgtgctggtcacagatggtcaccatcccctgggtgggaaccgttgctccgtttcacagatgagagtgatgagtcagctttatccggagtccgcagggggctccccgggcgctatcccaccctctgggctccagctcgtgttgtttcagacgttcccttcaggcacaaatgcactaagaagccctcgccaaggagtgcagagtggagagactgtgggatgcaggtgcctccgccgtgggggattctccaatgcgctgcacccggcccacagcaggctgtgcacaggcactgctgactgactgggagcttggcccaccccttccccatgccagggagtatttcagaattcacggcttccttcaggctctctgcagcatacgctatcccgggacagcctcttgccaaagggcgggtgataggagcagcttctcagagagctcccaggatggagctgtggtgcccctaggcagacacagcccccgagggaggatgggcttgacaccagcctcatcaatgctgggccggagggtggagggcggggaggctccttgcccacaggtgcgagcctagccaggcttctctgggcgggggctctcagggaagcctctggggcctgtgtccacccatcctctacacttctgctggggtgacccttgtgaaatgcaaatcccatcccctcactttctgtttccacccttcaggggatccctgttatgtatgcgggaaaaatcaagctcactcctgagactggccccagggactctgaggtcctgccaggccaaccccgcggcggtcacagtgggtgtcctcatggcccccaggccctcccccgccgcagtcacggtgggtgtcctcctggcccccaggccctcccccgccgcggtcacatgggtgtcctcctggcccccaggccagggttccctttcgtgctcaggcttcacacgcacagcccggcagatgcccaggagaccttggtggcgggctggtagtattactcatctgacgtccatcactgtagacaaaggttgtggagcatcgcgcggtgcccgctgctgcatttggaaaggctccctcacctctcaccatcctgagtttcactccttagccagcttctctgggatccctccaggtcgccacgctggcagccagtggaggcctttcttcagcacccacttgctcagcaacttgctggcaccgaagggagcgagagagccctgaggtacgggcctgcccttcagctgctcccccgaagcgtgagccagcccttcagctgctccgccagggagagggaggatcaccggcctgggcctttgcgaccttctctggggttgagtctgcaagggttagggtctcctgtgagtggcagagctcagggtggacagggggctgcaggtgggctctgcaccataggagaagctgggctatccccacagaggagggaagcgccatctccacaggtgtggccgggcagaccacccctcccagggccgcgcgtcacgcacaaaagtggggttcacatccaacccactgttgagagtgcaccagaacagcagatttgaaagggctttgacggcagtttccgaccccacccccaggcctctctcaaaccctcgccctgctcctcctctccagccacactctcttccgagagaactcttcccctctttgcctgtttctctgttgtttaacttctagatagggaaatctcaagcatacacagaaggagacagacaagtgcaggcgcatcacactcctcacagttggccttagtgtgcttcgtagatactgtgtcagttacagatggaaggtttggggcagccctgctgtcagtgccattttcccaacagcacgtgctcactttgcgtctctgtgacagcatcttttttgcagcagattttttgtttgtttctttgtttattgagacggagtctcactctgtcgcccaggctggatagcagtggcactatcttggctcactgcaagctccgcctcccgggttcacaccattctcctgcctcagcctcccaagtagctgggactacaggtgcccgccaccacgcccagctaattccttgtatttttagtagagacagggtttcactgtgttagccaggatggtctcgatctcctgaactcgtgatccacccgcctcggcctcctgaagtgctgggattacaggtgtgagccaccgtgcccagccagtaaagtatattctaattgaagtatgttccgtgttttttcagagaatgctttgcacattgaacagattatggtatcgtagaagcatagcttttatatgcactgggaagtcaaaacatgtacgtgactccctttttcaatgatctggaaccaaacccacaatatctccaagacccgcccgtgtcgagaacactcctgcactcgccaccagctcaaccacaaggcagcacggccagtctggcttcatccaaacatccacctcctcccctcccgtgtgatcctcaagcagctctcagacatcatatatagaggtttacaacatcatatcattttattcacaaatacttttaccatatatccctataataactctttaacatatgtattaggattctctagagggacagaaccaataggctatatataaatatataatatataaaaatatataatatagattatataagatacaaaaatatataatatatattataatatataatatataaaatacaaatgtatatataatataaatatattaaaatatatataatatataaatatattaatatatttatataatatatattaaaatatttatatattgtataaatatattaatatatttatatattaatatatatattgtatattaattgtataaatatacaatatattgtaattaattgtattaattacatataaaatacatataaaattacatataaaaatattaatatatttatacaatatataaatatattaatttatataatatatttatatatattaaaatatttatatatatatatatatatatatataaaggggagtttattaaatattaagttacatgagcacaaggaccaacaataggctgggatattgccactactggggatgaggaagctgttccttctggcaaaaaaggttcattagagtttacaagctcagtgtccccagcttcatcaaggtcctcccacacatccccattccaagttgcagagtcccattctttttcggtccatgccctcactttaatagtagacacctggcaaggctgtgcatgcaccttaacttgcaggtcagccactcacatggtaagagcttgtgtctgtttttccacaatttcagctcttcctctacaggagtgaagactctcactcaaggcaatcttagcagacttgagactcagtatctgcttctgaagctgggagacagaatccctgagttcatcattttctttcatcactttgtgcattgaacttaggagcaaccaaccagcttcattatgtttcttggttctccacacatggtcagaggtattatgtatagagtccctaaactccttgcctctcacgagcggtgaatcaggagcgtcaaatgcatttattttgcataactctctaaacaattcacgccaaggactatcagcattctccatactactagaagtagagtccttagcatttttggatctaatcatattaagcagccaactccggaaaccgcaaaaccaacagaagaactccatcctgaatattctgtctctctagaaccactcctggtaccaaaatctgtattagtcagggttccctagagggacagaactaataggagagagagcgagagagatatatatatgtatacacgtatgtgtatacatgtatagatatatgtatgcacgtatgtgtatacatgtatagatatatgtatgcacgtatgtgtatacatgtatacatatatgtatgcacgtatgtgtatacatgtatagatatatgtatgcacgtatgtgtatacatgtatgtgtatacatgtatacatatatgtatgcacatatgtgtatacatgtatacgtatatacatatatgtatacatgtatatatgtgtgtgtgtatatatatactcccatatatatgggagtttattaagtattaacttacaggatcataaggtcccacaataggctatctgcaagctcgaggagcaagcaaggagatccagtccgagcctcaaaactgaacaacttggagtctgatattcaaaggcaggaagcttccagtatgggagaaggatgtaggctgggaggctaggccagtctcactcatttcacgttttttctgcctgctttatattaagtggcagctgatgagatggtgcacaccacattaagggtgggtctgcttttcccagcccactgagtcaaatgttaatctcttttggcaacaccctcacagacacgcccaggattaatactttgaatccttcaatccaatcaagttgacactcagtattaaccatcacaatgtataactacaaagtcattcttacacctaagaaaattataataattgcttagtgtaatcggttagctagtcagcatttgaattcccctggaattttctgctctgacagcccacagttctatccttctagacttgtcagccctaacccatgccactgaaaccatgatgcaaatcaatgagctgctttagaaaaaaaaatttgtatttttaattgacatataataatcgtatacatttatggagcacaaagtaatgtttaccatgtggaatgattaaatcaggctaattagcatctgcatcacatcacattctatcatatttttgtggtgaaaacatttaaaacctactcttctagcaactctgaaatggtgcaccgtgatttcttatagtcacgcgatgcgctgcttgttgcagagtccagtgggtgctcgcgtccccggtcttgccctggcctttgatttgaggccgactccttgcctggtttccagaacactctgccctggctgctgcagctccgcttctctctggggtttcttggggctcagcttttccccgtccctcccccacgtcactctccatcctcagctgcctctggagccacagctcccaaatgagtcccctcccgcctgggagtctcttggggaacccaggcctgcaattcccactgtctgcctggcatctctgccgggcgcacccacaagttccttgacccaacttgtccaaaattgagtttctgtgtagtagccaagagcaagcacttagaagccagaatgcccaggtctggctcctggctctgtccccataaccctgggtaaattactccacctccctggggctcaatctccttgcctgcagggctgcagagaggaccagatccgcagagggccctggaagcagtgccgcaggagctctgcctggggatgaagccgtcgctgctcctccccagcctctcggcagcagcagccacggtggcaacaagcctgctaacatgtgcccttgggagggtgcctccacccaccccaaaatccatgacagaaaccccagcctcagcccaagtctctccaccacacccacgcattacatattgtcagaggctgcttttgccctaggaaagcagagttgaatagttacagtgaagcccttcagtccctcaaagcttaccacccttcatgtctggacttttactggaagtatcgttatgtccaagcctagagaagcagcgtggaccttagagcaaggcagattcaggtttgaatctagctcattatgggggatgtgacttaacccctcaaggcctcggcttgcttggtcccctggtcactgcaactggtggattccaggcccttgccaacaggtccgcctctgtcactcttcttcctgttgcagccccgccctcgctcagaccaccctctgcagcctgtgaccttgcaggagctcctccgggctgggtccccacaccctgtgcactccctagctacagccaaagccatctctctcatgtacagctttgactgtctcactctctgctttcaaaccttcccagagaaacctctgatctctaaagccattcagtcccctggacgtgcggtgccgtctctcccgggcctttgaacacacagcctcttccacctcagctgctggcccctccctgccccttgctctccacgccgtaactctcctctccactgttcaagtctctgcctggatgcacctggccaggggagccctcctaggcccaggcactgcccggggagccctgctgctcacccccacagtgctctgggctcattcccagcacagagcccaccctgagggctggaattgcctgctgacctgcccgtggcctgctctagaccatgcaccacgtgaggacaagtggctgatgccatcccaggcacacagatcctacctcatgagccagtgcttctcacggtacctagtggagaagcattcggagaggatttatctgatggatgttgactcttggctaacaagggctgcctctctccatcccctgactttttaggacaagaccagagatgctaaggccatagctaggaaagtcaggccctggaatgagaccgtctaggcttgaactccagccttgcttcctgttggagcatgctatttaacttttcatcttattaaacagaaataatgggagtggcctccaacgatctgctgtgcaatccacacgggcaaacatgaaacctcctctcccacctggggttagagcagcgaggagacccaggctggccaggacagagactggtggtactttgcccttgttaagagttcttggggccaggcatggtggctcatgcctgccatcccagcactttgggaggccgaggtgggaggattgcttgggctcaggatttgagaccagcctgagcaatgtagcaagacctcatctctgaaaaaaaaaagaaaaagaaaagaaagaaagaaagaaacaattagatgggtatagtgatgtatgcctttagttccagctacttgggaggctgaggtgggaggatcgcttgagcccagaaggttgaggctgcagtgagctgtgatggtgccactgcactccagtctgggaaacagagcaagaccccatctcagaaaaaaaaagttatttgaaaacattcttccacaaggagaaaaagaatggatgcttcgcggtcaaggcctaatagccagccgggctgggctcgtgtgaggctgtaaaaccccatccgcagcttctgtgatggtgtacaggggagcggaatgcctggtgctggcgtcaggctcactgtcctgcagctctttgctggcctggcctgttctccaccctcgtttgctcctgggtcttgtaaacagtgttcctttgaccttcccctcgaggaccagagatcacttgctgtctggcgcaggcgctcctgaccttcagatgtgggaggactgtaagaatctcagggagacccccacccactgcttgcggtggtctcctttgtcatagacgacagatgcttgccacacgcaagcagaggcagggcttaaaggttactctcatttctcaggtgagaaaaagcaaagtgcagatggtttcggagggtcctccaggaatgctcagctcatccgtgggaccaggacgcacaggcctgcccactgcatctaaggcagcgaggccctgtggaatcaaatcagcactgagacagagggctgcaggacgtggtcactgagggcgtgaagccagcctgtgccctcctggcctcacttgccccgtagggcctctcatgtcacgtcacctgcctctgtggaaatgtcctgtagctcctgtttcctgcagggtgtcacagaagcgccaccttctgctagcggcccaaacccatcacacacccccctcatttgcccctcacagagtggtcagaacctactgccagttcccactgcacccctgacagctgtagggttaaaggatggggacaaagtcacaagggtgttggctgggacacctgggccaggtgccttgaattctgccccagggctctttgcacttgacgcaccagctcccagtcaaggcctctgctctcattgcagccctcctgcacttccttcctctgcctcggagcaggatctgcaaacagctcagcggccaagcctagcccattacctgttcttgtaaataaagttttattggaacaccgccacacccgtgcatgttgttggaggctgcttttgccatagaaggtggagttgaatagttgcaacaaagcccttacatccctcaaagcttaacatccttactatctgggcctttacctaaagttgtgcgactcccaccttagagaagcagcttggaccttagggttaggcagatccaagttcatatcgagctcattctgaggcctctgacttaacccctcgaagcctcagctttctttttctttcttttttctttgcttttttttttttttcctttgagacagagtcttgctttgtcgcccaggctggagtgcagtggcgtgatctcggctcactgcaacctccgcctccctggttcctgccattctcctgcctcagcctccagagtagctgaaattacaggcacgcaccaccacgcctggctaatttttgtgtttttagtagagacgggggtttcaccatgttggccaggcttgtcttgacctcctgacttcaggtgatccaccctcctcggcctcccaaagtgctgggattacaggtgtgagccagcgtacccggcctcagttttctaaaaggagaatacagtctttctccaacaggttgaattttgtgtgtacaaactgcatataatgcagttaatgagttaggggctgtggattgcaccatggaggaacaccaccgcttgtgatgctgtcatgatctgtgaggacccggatcttcctgtgatggggactcactgtacgggccaggaagcacacacagtccgcaagccgcagagccggttggctcaagcgtcttttaactttgtttatcataacagtgggtgatgatggctattgagctgataagaaggtggaagcactatttcctgatgatgggaagcaaagatcattactggacgaaatcaaacgccagaattgtctagcagtattgaagtttcagagctaacctttaaaatggaaatatctgtaggacaaatatgtttgttatcgtgagtctgaagctctctggcctcatcctccttttcctatggaaacaactgcttttaaaacagtctttaaagctactcggtttgttagaattgcagctgccatgtcacagcagagcagactaaggccatcccctggggctatggaaggagagtgtcccctgtcccagctgccacacctgtgctgctctcagcccctcacctggagtgctctgcctttctctccacacatccctgtgctcagtcagaacttagagcacacagcaactcctcctcttctgtgttcttgaggcacctgtactcagcgaaccactcaaattaacccatgcacagttctagaattctgtcatcctcactgacacacctgccaataaaaaccccatctctactaaaaatacaaaaattagccgggtgtggtggcgggcacctgtaatcccagctactcaggaggctgaggcaggagaatagcttgaacccaggaggcagaggttgcagtgagccgagactgtgccattgcacttcagcctctgtgacagagtgatactccatccccccaccccacaaaaaaaggccaggagcatctcttagatttcctctgcgtacctgtagtgccccacccagagccaggtctgggtgtgtgtaaagacatgtggaccctgacaatggattatcacctgtacacccacaccatgaaatccaacattcatggcaagggctgcaccaaactccaggcggtcttggagacttcaaaatgtgcagaggcttggctgaggccggcaccttcctagaggagctggagctacagctgggatgtatcagtcagctgttaccacatagcaaatgatcccagtatagcaacctaaaacaacacacatctcctaccttggtttctgtgggccagaaatctgggaataacttaggtaggtcctctgcctcagggtctctgggacagtgtcaaccaggcctgtggtcttctctgaaagttcgaccggggaaggatgcatttccaagctcacccatgcagttgctagtgggattccattgttcgtggacttttggacttgagttccttgccatgaagggcctctccatggggcctctcacaacatggcagctggcttccttagcatgggctggccagaccacaagagcaggtgagcaggagagatggcacaggctcttgttgctgagtcacagcagtgccacattctagtccttagaagcaagccatgtattcagcccacattcaagggaaggagattctcagggcataagtaacaggaagtggatctgcaaacagctcaggggccaaatccagcccattacctgttcttgtaaataaagttttattggaacattgccatgcccatgcattacagattgttggaggctgcttttaccataggaaggcagagttgagtagttacaataaagtccttacgtccctcagctcatgtagggacctgaagctcctggtgggcagggcagatggcactcagacatctggggtgcactgggcaccatgtcctttgttcctagggctatgcacttgcccagacacggggctctgcatttcctgggttgcttgctcaggctctgctgctggctttcttgcacttctgccttgagtcattgctgtctatctccaactctcacttgtccccacctgagtagaagcagggtgatccctttaaacctcctgattcattgagaaggcctcccgagctgcagagtcacccagaatggagcctgtctccaggtccccctgctcaggggagcagattgcgagcaagatttgccaagaaggtaaatgagatcagagaattctatttcccatagttccttaggaaatcagaaagagaatctcaccagtttgctttgatgtcattaaagcaaactgaggaatatacaatttttaaaaaatcatataaagaaaattatttcattatattaaaacattaacattgattctcaaattatccattaaaaccttgctttacccaaacagtcagtcaatgggctacagaaactgaaagtagaaatctggcatggtctatcctggtccagtactgctctagccacagcagatgcctggcatggcacagggaggctccggtgacaggaggcgcctggcgtggcacagcgtggctctagtgacagcagacacccagcatggcacagggtggctttggcaacaacagatgactggcatggcacagggtggctttggcaacaacagattactggcatggcacagggaggctttggcaacagcagacacccagcatggcatggggtggctttggcaacagctgacgcctagcatggcacagggtggttctggcaagagtggacacctggcacggcacagagtggctctagcagtaggatgaccacctgtctggtgtgaacctaacatgcaccccgtgttcccacccttctactctttctccttccatctctatagtcagcagtgcccttgctccctggcccactgtcacgtctcaaatcttccctgttatttaaggaccagccagatgttctactttccaggaaacatccacatccctagctggacatgctctctgggccccgaccctgtccccacactccgcctggcaccgtgattattgtgatgcgtgtctctctctgatgaaacttgtctttcacatctggtgtccacctgtccctcagcccaaggcctagaccctggttaatattcaggaggattttggcagcgttaggctgggataacaaacaacctccaagggctggtcccaccagtagtgctggtccctcccgctgccgccctccgagtgccagcatcttctcttctgctacctgccattttcatcccaagactctggttgggggagcagcccccgtgtgactggccagcctcagggctgctagaagagaaggttccaggccatgtgactctccagaaagtgagttgtttggtcacgtggggccagaggggaaaatgtgcagtcctccctcagttggagcgaccgccagtcacagggccatgtcgctgtccccagatcaaatggatgaccttccgcctggcggacggtgaatgttttgaatgagtgggcggaggctgaatgaatgagcatcattctccctgcagagttaattcctacagctctgaaacttttccctcactctctgaagcctccactcctccaccaaatgccacgtagaaccgttttgttttgtttttttctcctgagatttgagtcacaccggtgcctgtccagctgcctcaacttgcagcagaggttcctaaaccctgaggtgagggggctgcagcccaggcctgccatgcagggctcaggttcaccttgggtctggtgggacatggagttagaaccatgagctgctggtgctctccacccaccagcaaattaagactaagtcagggcagccactgtgtcccagcggctgcttttgatccagctgaagctcgctggccacttagggacggcgagcacagggaggttgggcgaggcgacagaatgccgtccttgctgccgtttggggcttggctgcagcctccagcccaccccttcccgcagaggcaggaggccacgccataacccggctcaggccccagcgcccagccacgcaaggccatccaagcaaccagccagaattccagaacatttcagaaatgtcaggaattccacgatggctgtcaggtgagggtccctccagaagtcctgaaagcttgtctctcattgcctcagcaagatccctctcccaggccgcagaggccccctggcgagggtacaggacccatcacaccaaggacctgagtcactcagctctgcgatggcatcgtagccttagcgtgagaccccagagaaaaccccagctttgcacctttccctttaaatgccagttgcaggcaatctccctagcagcagacgccagcaattgccggtctaaaatgctttttaaaaataatttcatgtattttttttttaaaaaaaaaaagcttccaagctggtatgtatgtcatccttacaccgcaaatgctaaggtgggaaaacaaaaaacgaacgacaatcagatgctccgtgtctcccaaactgcacacgctttacggagaaggagagttgcaccggggcttgtcaatggcagagccttcctgaaagtcaggttctcctgtcagggtggagacccagcggctttcaggagcaaaaaagaagtctccaaaccgacacgctttgctcagcgttgacatatatttctctcttccctgctggtgtcaacaaaaaatgctttgttgcctgcagtaattttacggtccagaagtgccttgctgtagcattgctggtaggcacggcagtgcggctcagctgcctgagacagggtcatgggcctttgcccagctcgtctccaccccagagaaaggggcatgcgggcccctaatttatgggggttcacctggcgctcacagacccaccagttcctacaggcggatatccaagtccagagctgtcgtgggcgcgctgagttgggccatctttggaaagaaaccctggggctgtcgcggggggagggcgatgtctcaccgactaccagggtaatggccgcgctcaattttgcctttcacattttaattgtacaacagtaattttgcaatggagttgccgatggcaaacatgcaaaagacattaactttatttatgttttggattattaatgtggctgttaaaattcctccagttagttttgattgaattgtttttttgtgtgattctgctgtttaatggggcggtaaataagaatttctgataatgaggctgagcatctgtcacaacaacctggtgtgggctattaacatttccattaacggcagggtgggcagtgataatacggaaaccacacagttagaacaaaataaatagttggtgtcaggctgagtgggtgttaattactattttattctgcgctggggggagagagcagaaagtggggagggggtgatggggaaggggcgagtcctgaggtcagtctctcccaagaaggcctctccagagagccgggtgctgggccatctccctcggacagcgactgttttatcgtctccatcgatggtccgtaaagacactcagtcaaaaggctgcactcctgggccgcagccccggcggcaggcggagaggagtgctcggctggcctctgcctccgggagccaggccccctgcacagctgccctggagctccccagggcccagctcatggacagccgggagagccccagtgggaggagggagtagcagagaataggccgtcaagagaaagtgcgcagcgtggaattcaaagatagtgtgaagctggcatggggcagacaggacggaggcgttctggaacgcaggcgtgtgctcccaactgcctaaatggctgtgtggtgaggtgcggaggtgcggccacacccctaatggcggtgtggtaaggcgcggaggtgcggccgcaacatcctcatgtgtcctttggtttgcgtgtgccatgcagccctgcagacgcagacagcaccccagtgagctcctccccagggggagcgagggggctggaggggaagactggatcctcagaacgtgaagccagagctggcctcagagagcaaagtgcagccatgttctcaaacatcggagcttcctgtccctcttagaggggcaactctgtgtatctggacgaacttcatctagatcagggcttcatagccagggatgcctgaacctgtcatgggaacacagctatcttttctctaatctcaatcagtaatattagtgacaaaaaccacagcagtcaggagtcctgtgactccctcgccgatagagccgcagtgaccctgtcacatcccaggcattgctgggacctcaagttaacatcctcacccaccaatgctttgatctcacagcaaccatcagaccagcccctaagcctggtcaggtattaaccaagaagcacgtggattacgatctcatacctttggtttcaaatactctgctaactgtatctcggtataattatttttctgtgcaattctatatattttattgtatgcatttaagaacatcgtatgggaaggatttgtggtcttccctggcataaaagggctgagagctcttagggggacacagagccacggatcccaggacataactgtctaaggcctcctaagccagggcgacggcccagggaagaatctctcacatggttcccagcggaattagggcatgctcgagccccatgggcatgtgggcgagggtccgggccggctctgaatgaacgtctcagcttctctccgcattgctctttcctcagccccggccatggccccgcagaacgtgcaggtgaccccactcacggccagccagctggaggtcacgtgggacccaccacccccggagagccagaatgggaacatccaaggctacaaggcaaggccctcccgtgcggttgcctcccctggctcgcttgggcacccctcgttcacgtggtcctgcctactgcattgccagcagcagaccccgcaggcgctccacctggagagctggggcccaagcgtcggagcttggctagacctggcctgttaactgtggtcacagctgcttgtgggtgggaggcagcacaggggccaggctcactgcacacctggctgtgcccaccacaaaacaacccaggttgggggcccttgtttgtccactggcttctccccactctggacgcatggcctggctggggaacccttccgtttcctgggcccattctggagcccccagtacattggctgactataaaagaacatggggcgcctggaagagaccaggctccccatcccagctccccccttggtcacagttggacactgagtgagtcccttgattcggtcggtccagggtggggcccgccagtctcattcctcacaaggtcccagatgtgaggtccctgggaaccctgctttgagaaccgccacggtaacatgtgagaagcccattgtcactggagggtctagagatggggagaaaggaaggcagcaggccatgacaggagagcgtcgagtgaggaatcattatgtggggctgggttatccatggggcgggaagcacctctccacgtcccatccctgaggcctggcctccttagagagtacagggcccataagcatccggggtctttgccatgaaaacgcccccatccttctcctaaataaattcccctgtctattctgctgggacccaagtcgatcagtcatcagattctgggggctagcctcccctaatgactattggaccgattaaatgtccatttaaagatggtttttgcaggtgtgttatgaaaattaataccttcctccatggcagggctgttacagtgatgaatgagctaatggagagccccatgagcttggaggcatggcgctatttatgtatgtccaaaatatgttttctaatttccttaatgataaagacactgatcttggatattgatctcaagttagcaaggcctgggcgagcggaagatcttagacggtcaattcagtgagcagaagcccactacatcctgcaggtggaaatgaacgatgctcaccagtcagggcctgcccagcaagagcaaggcgggcgggtgtgcgaggcaggcgtgccagccctggggcgctccaggctgcctccccgaagcctccgtgctgccttttcacatgggcaagccgctctaacagcctggccctggtttagacccacagagccaaggtgggtcttctgattggtgttgtctttgggcagcctggctggcactggtcggaggtagcagtggtttccggccagctgtctagggaagcaattctggcaacctctttaaacctttgtgcttgggcgtcaagttcaactacaagcacataaaagctagacaagaggaaatggcaccccagaggaatgaggccttcccagcagccctgagcccaacatagttctcctgcctgttgtttttgattgctttaatctccaaagtatattgccatattgaggaaaacttagatgtcggctctgaataaaatgtgggaacacatcgtaggagttgggggtttgttgtctccatagctcggagcagggggtggacacggggcggcttcccttctctccagaagatgggggagagggagaggccaaaaatcaaaacaccaacagagctaggtctgcaaggaaaggcacatcatcggcagctgaagggcagcttcccttccgtcctcacaacttatcttcaacagcgctttgtttaacgaggcaatgctcatactctaggtgagcaacaggaaaatgttaaacatcgtctcccaaacaacattagcagccaggggtccccgtccatacacagtagcctcagcttctccctgattcctccaggagggagcctttccaccttcccacccagcacagctcgccccagaactcagctcaccccctcgctttgaccttacactcagtggcccccgcttactggaaggcttccccaggacccaccccaacctcttgctgttcctaacagatttactactgggaggcagacagccagaacgaaacggagaaaatgaaggtcctcttcctccccgagcccgtggtgaggctgaagaacctgaccagccataccaagtacctggtcagcatatcagccttcaacgccgccggagatggacctaagagtgacccccagcaggggcgcacccaccaggccggtaggaggaaggcgggtttcctttgggcaggcctccttggacacgtgttttgagagcgccagctcaggtcccctcacacagtggttcccggcccgcccaggcggaaggcaacaccttttgagtagctgggagtttctggatgggcaggactgggtttggctcatttgttctccctgtgcctggcctcagactggtacacagtggcgctaaataaatgttaggtgggttggagcaatgcatgctttttcccagagccctggagattcagaggggaggaagggctttgagtctgcagcaaggcctcgttcataactgacagcatccattccagttcctccaagaaatggaacttcccatcaggggcgcctgatggcatgtccagatccttgggggtaggctcctcgggcagtaaatccaggccacagcgacgggaattcccctgggtctcagggccacagaccacccctggagactgctcactacacacatgccacgggccagtcccgagggctcagacaggtgctgcgctgctgtggcctcatctccacgcacagggcgcagcgcctgttctcagtcgacccctcttccagcgcatctcagtttcctagcagcctggaggatgctgtgaagctgcttggccttgggctctgaggagctctccaaggccctctgtaggattctggaagtctgagagactgggagagtgaggtctgggaaccgtgggcagagacgcagggctcagggccttccgacattccatgggttcagctgacccacagacaatggactccgggaatcagggccccttggcatcaaactctcatgtgctgaccacaaccaggttgcaaggaccacttcctttggcttcatccagtgcccgcatctgagctggaaggatgtgggcagatctgtaggcagagatgagggtagagccatgttgagcactgccggcctggcaggtcacagctgtgggtcccagagactggagggagggcagagagggaggagggtgggtgccacttcacaggcacttctgagcagcgaggggcaccagggcgaggagagtaggtcccccacctaggctgtctggtaggggcagccccagtacacgcccaccttacacggcgcccgggcagagggggagctgccagcaggctccacatcaccccggccacacacctgaccttcagtagctctagatatttccaccagctccctccccgctccagacccagggggacactcagcctggagagtgtggtgggagatttcacgtgcaggagccaggggtgtcccccaaaacccccaggcctctgagggagaggcgaggaggggtcaagagaggcttcatccatcacagagctccgtctctccggcaaagagcaggactagagcttctggaatcctccagcagttgctagaaaatggagctccctgcgtttcattttctatttccatctattattcatttttatgcctttgccgttttgtctctcaagcccctttgtgtttaaacactgtcattttctccactcttctcaggagggtctgcgtgtctgattgatcctcggaagttctgaggtgatcaataaatcttttcattttatgacattcagacttttactgagttgaaaataacatcgaataacattttttattctatacggaggcacagacatgtatgtatatgatctatgtaggagcccctgtaaaagtcactttgtgttctattctcccagcccctggggcccccagctttctggcgttctcagaaataacctccaccacgctcaacgtgtcctggggcgagcctgcggcggccaacggcatcctgcagggctatcgggtggtgtacgagcccttggcccctgtacaaggtaagacccggggttggggagatgggagcgcgggccacaccagtgcccagccctctgcagtctacacagtgagccgcacctgaccgcttctgtgggccaggagccttctggcgcctgaagtggggggttttggaatctgagctggacggggctggagctgagtgcgaggggagcggggactcgcggggaaaggcctgtgaggaaaagctgagccaagaccagacctctgtgttctgagaccagaacggcactctccctctgaagccgtgtcatatatgcccttgatcctgtctctgtcacactcaagacattcctctcctattcctcccgagatgtttgtcctgtggtcgccgacagagaccacccagggttccacttgaagccacgcctcacaacacaggccttcggctaccctcagcatcctaggagggatgctggcatccccgtgtcttagcaccctggtgctcccctcgctcatccgtcccctcagcggacatctatgaagctcctgttctacatgctggaaaagccaagacatgctccagatgctggaatcgaggacctgggaaagccaggattttgactggcttgtttatcaggtccctggctttcctgcgtccaggcagttcctattccagggcagaggtaacacacaggtaattaaatcagcaaacaacagcccgagcgtgatcagtgctttggaggaaagagaggagggctaacacaagaggcttagggaagagaccggagtgacaagggcccggacacacaagaatcctggggaagatcttccgaagggaggatccgccaatctaggggcccacggtgggcagagcttgggtggtgctggtggctggagcttggtgagtggggtgcaggcactgcaggccacagcacacggggctatggcatatcccactggagagtgacacaggagcaggaggacctgacctccccaagaccaggatccctcgggcccaatcccccgtctcagtgtcacgatggaaagaagctatcgttcatctccacacttcctagatcaaccggaaacagcttccatagaagagcagggaaggtgttgccaacacagaggactttgaaagaggaaatgtcaggggcttgacagtgagtgacaggtgaaaacggaaggtggaatgcagatggctcggaggagaacgggtggcagagattctgtagaccagggagtgaggaggccggccggggctgtggcatcatcctacaggagagcggcgagaaggggaagggtgcgggggcaggggaggagggctcagatcaggggtgtgtattgaaggtggagctggtggggtactggcgtgaagtggaggaatgggggttgcgggcaggtggctctgccctgctgtgcatgtggctgctgctctgcacctgctgggtcagtgcacaccctgctcaggtatttgttcttgtttttgtttctgttttttttgagacggagtcttgctctgtctcccaggctgaagtgcagtggcacgatttctgctcactgcaagctccgcctcccgggttcgcaccattctcctgcctcagcctcccgagtagctgggactacaggcgcccaccaccacgcccagctaactttttgtatttttagtagagacagggtttcaccatgttagccaggatggtctcgatctcctaacctcgtgatccacctgcctcggcctcccaaagtgctgggattacaggcgtgagccaccgtgcccgacccctgcttaggtgttattccagtgccttctgtgtccctctctcctgccatccagacaccaatgtgtccaccaaagattccggtctgggaggcacgtctttcccaccacactggggtgaaatacaagtccagctgtctctgccttatggtccagggcaagtttccccctgtaatatacacagacagactgtaaaaattatagattatttaatgtctgcgaggaaaaaatacaacgagcacatcaaagaatatcggcgctccatttaaagccgtgataaaagtttcctttaaaaataagcacatttagatgaaacggagttgatttgatgaagaaaatttaagcactagttttttatttcactgaatctcagatgccattcactgtaagattcatcattattttatgaagtgctcagaaagaaaaaatgctcccaataaaccagagcccaatacttttgtatcatcaattctgagctgcatcccaaatcggagatgtgaaaatccgagaaagaaaaaaaaaatcacgtcttagacaatcgatggactttggtaaataacagtagaggtgagatgtgggcatggtttttgaaccagcagagagggcatgggagggacggggatttagtgtggccacttcgaggggcggccaggatctgttgtgaccttccgagtgcccagcacctgcctgggagccagggggcctggacgaggctgccttcgaggtcccacagcagaggcccagaagcaggcatgccatttgctcttgcttgtcctgcagggagaaacagtagagaattttggagacacacacgggttccatgagcctgtgttacaaatgccttttcaagggtcataaccaacgaggaccatttaaatgagaattgactgtgaaagcttcatagttctgattgacctgtgagtccttcctaatcaaaggcagctcaggttttcccattcttcctcaagtaagtgactggttctgctccccagtcttctgtgttaatggatttgcagaatctccgtggaaactccatggtgtgtgcctctgggcttctctcttgggctgctgctcttagtcttgtgagaaagtgcttcatgggctgggcgcaggggcctgtaatcccagcactttgggaggccgaggtgggcggatcacaaggtcaagagatcgagaccatcctggccaacatggtgaaaccccgtttctactgaaaatacaaaaattggctgggtgcagtggctcacacctgtaatcccagcactttgggaggacgaggcaagtggatcacgaggtcaggagttcaagaccagcctggccaagatggtgaaaccccatctctactaaaaatacaaaaaattagctgggcatggtggcacgcacctgtaatcccagctactccagaggctgaggcagaaaattgcttaatcctgggaggcggaggtggcagtgagccgagatcgcgccactgcactccagcttgggcgacagagcaagactccgtctcaaaaaaaaaaaaagaaaacaaaaattagctgggcatggtggcatgtgcctgtagtcccagttactcgggaggctgaggcaggagaatgggttgaacccgggaggtggaggctgcagtgagctgagatcgcaccactgcactccagcctggtgacagagcgagattctgtctcaaaaaaaaaaaaaccagtacttcattccaggcaaggccattccatgggtcattacccagtcagaagtgccgcacaggggcctcgatgtgttgggtcctcttctctctgcagtttcactcccctagaattgtttcttggcttctaccaaaccttccccctagcccagtctcccagacacaagaccctgcacatctggcttcccttgtgttttcagtgttgccgtttcttgttcgtttcatgacagtttttgcatcactgggaaactcaaagcattcggaagatttttagacaatcctttcagcatgtcccgcttacatgggcattctgtgttctcgctatacacaggcaccccccaggtataatcacagtgataggtgatgtttgttgagctcaagtcgggcactgtgctcagcacttaacatccgctatctccaaatcctcagaacggctctaccttgtggctgcagcttttcttctcctcccgcagacagagagattgggctcagagccacaaagacatttgcccaaggcctgcgttttgaaaataatgacgagggttgggatttgaacccaggtgttctgagtccagagccaaggcctaaactgctccatgatgggcagaaagcgtctggagcacttgtgtttctgaaagtaaatgtgaaggtgaacttcagagatggggcttgaggaggattcactaaagcgttttatattctagacaaaccgctggctgcacagccgagtagggggcctgtctctcccctggatggcaaaaggtggagtcactttagtcacaaccgttttcgcctcttttcacaaatagcaagaccgtccgtcaccagccttgtctcttttgtctgttgcgaagggctggttccttcatcctggattttcctggctttgcaaccgaggcaatgtgctctgagattagagcgagaggggagcagcactgtcttgctttgcagctccttccttggctctgcaggctgaggggcggccaggatctcagcagaaaaagctccatcaggcctccccgggtgtcaggaagaacaagccatgcagaccccccacgtttgggcttgctgggggcttgggcacgttccagacttcggattcctgcacatcagtcaagcagcggatccaggtgtggattgcccagcggtgctggtgacatgaggcgtccagcccccacccaatggccttatagagcttcctctagacatgacacctggctctgactaagccatggggcccccgccggggtctttcccgccacaacaccgtcagtctgcaggcaccatcatccgtggtccggctccagccgggatgagcctgagtctggctataggttccagatccctcctggcttctccctcgggcaggactcagcaaccctgccccccagtgccacccaggtggacctcatggctgcctggggaaggccctcctcaccacaaatgccagcagagcctcgggaccctggcgctcgcctgcctcccctgatggtattggccagaaccctggctcgccgagacactaaccccaggcctgtccgacaagccacatcccgtacccacatacgtcaaaagaagaacgtggaccaagagaggatggcagatcagactcactgagtcagcttatatctcatcgggggccagagcactggcatctgatgaagattcccaattggtgggtggtgaaggtggaggtggcagaggcggaggggcctatctctcccttctcctgagtccaggccttgggcggagtccccctacaccgactctgcgctgggccacgggattcgcttcagccagcgggacaatagctgtcatgaggcaagcagcttcaaaagcatttgcacgtgggaggcaccctggtcctcctgctgcccttggaacccaaccaccatgtgaacacacctgggctggcctgtggggtgacagtcacgcacggcccagcatgggagaggggccacctgggccagccaacccccagtgagactcaatgtgtgaccgcagacatgctgagtctagtgcaggccagcccggccaaaggactgccccgcggtacgggagctggtttggtggtggtggttttgagccactcggttttggagtggtttggttcacagccgtgcatgagagaggtacagcaggtgaggagtccatgttgattgtggagcacctattacttgatgcgttcttagacaatagtcagagttggggtcctgactatcggctgggcactcccactcatcccccctgccctgctccactcctcaccgtggtcctatgaggtaagcgctgccaacctcagagcagagggagaaactgaggactctgcagagaccacatgtcctgcccagcctcacacagggagcaagcagtgggcttcagaccactcccatccccgttcctgcattctctcttcctcccagctgactctgcagataccacaaccggccttggcaggaacgtggttcaggaagcactcatcctggcagctgctctctgcctgcaggcatttctgagtgtcttggcctcctgaggctggggaagggaggacgtgaactctctgttgaatgtgggaggatgccgggatagcttgaaaaggacgacaacgccacacgatggagtgtggccaagggcagggtggttgacagaaggcaacgactgggaaaaagcaaagcagcttcgtgcaccccgtggaggttacaccatccagccctcactgccctgcacctccacacccagactggccccgccccacggccgctgctcccactctcacccggaggggctgcactcccgtctgctcctccccgaggcccctaggagacaactgtgcctgcgtgggggactctgaaaaatccagactctaaccctttcactattgcatcaggattcccaacggggaaccacaaaagcggtaactggacctccacatgactttcaatattttgctcatggagtctgtgcgtgtcccagggaaacagttgcaaacgcagtgaaacatcaggcatccttgaagtatattgtgatgacaaaatattttaaaatatggtaaagatagttaaaaagtaaacagtgatctcacctggtaggggatctgtggggtcttctgacctctttccacacctcctcacccagaaccaggtctgtgcctgacatctgcaaactcttggctgggcattgaccagtcgggccaaggcaaatagagggtacagcatttacccggtatgggcagctcctctagtcactccactgtgaacacagtcgtggctcatcctgtgtgctgggcagagcccagggccatccccagccatccccgtcactctagggaacactcctcgaacccctgggacatcacattgtccagagcaccaggccacccggagcaccacaccacccggagcaccaggccacccggagcaccacaccacccggagcaccaggccacccggagcaccacaccacccggagcaccaggccacccggagcaccacaccacccggagcaccaggccacccggagcaccacaccacccggagcaccaggccacccggagcaccacaccacccggagcaccacaccccccggagcaccctgccacccggagcaccaggccacccagagcaccaggccacctggagcaccaggccacccggagaaccacaccacccggagcaccaggccacccggagaaccacactacctggagaaccaggccacccggagcaccaggccacccggagaaccacgccacccggagaaccaggccacccggagcaccaggccacccggagcaccacaccacccggagcaccaggccacccggagcaccaggccactcggagaaccacaccacccggagcaccacaccacccggagcaccaggccacccggagcaccacaccacccggagcaccacaccacccggagcaccacaccacccggagcaccaggccacccggagaaccacaccacccggagcaccacgccacccggagcaccaggccacccggagaaccacaccacccggagcaccaggccacctggagcaccaggccacttgagcactcagccatgtgcttgggaatccgattttatggcagagctatttttacattttttaaaatgtttttaatggtggtggtttatgggattgtaccctgaggctttgtagtgctgggcatggtttaaaaattgattaaataaataaaattctgacacacctgaaatggggagaaggccaggctggctctgcctcctgtgggatagaatttacaaaatctgtacctgggtttgtttttgctccagggagaaggaaggcatttttaacaatgaaaaaaaaagttgctctctagaatcactttacattggacaggacccagtttgtgtgttgatgacagtcactatgtgcacaaactgccatcctcatcacctctctgagcaatggaaggtcagtgctcacacatgccccattcctctacaggaaaacccagttttggagggtcacccaaaagtagccaaaattggccccaggcacggtggctcatgtctgtaattccagcacgttgggaggccgaggtgggcagatcacttgaggtcaggagtttaagaccagccgggccaacatggtgaaactaaaaatacaaaaattagccaggcatggtggcatgcgcctgtaatcccagctactcatgaggctaaggcaggagaatcgcttgaactcaggaggtggaggttgcagtgagctgggatcgcaccactgcactccagcctggatgacagagcgagactccgtctcaaaaaaaaaaagccaaaattgctctgaaataattcggaagaaaataatttagctgaatatatgtttgataaaaggcataatatatgaaaacactgaaccagctagaagatatgttggagatttttaggataagagaaatttgctttgatggctttgaaagatggacccgttttgtagtaggaaggcgctttgttctgttctgaagtggagatgactggggtattccaggtgctgactagcagcgcacgaccctcccgcaccaaggcagccatttcttagggctgacagcaggagggcagggctgggcaggtggactcaggacggtgggtgccactcaccaagggcagctcttctcagggatgctccttggaaaatgagctctgccaatcggtccatcctggaagtaccacaccttgatatcctcctccaagagctgcctggtggagattaatctattgaaagttctgagaagtccagcagttgagaacttatctaactgtttttttttttaatgcatcattttcaaacttgtttaaccaaagaacttgatttttccttctggaaaatgctgcatatgtgtaattttcaatatttattctctcccctaaaatgtgaaatctccattttctatttctaggtaatccaaccagcaagacttttgcatgatcacttgtttataacatcccataggtttgaggacgtttgtctctatgttgccatcgtcctctgaatcgaggcatcaatacttgcagtgaaattaattaattttttaaatcctggcttcagagtccacagatgaagttcttatgactcatttgaggcctgtaggccgcaagttggccaacccaggcaggctgcagcctcctcgtggggtctaactagatggagtatcttcctacatcttgtatacgctccctgtgttaatctgttctcacactgctaataaagacatacttgagactgggtaatttataaaggaaagagatttaatggactcacagttccacatggctggggaggcctcacaatcatagtggaaggcaaaggagaagcaaagtcacatcttacatggtggcaggcaagagagcatgtgcggagaacctcccatttataaaaccatcagatctcatgagacgtattcactaccacgagaacagaatgggagaaacagccctcatgattcaattatctcccccaggccccaccttgacaagtggggattattacaattcaaggtgagatttgggtggggcacagccaaaccctatcactcccctccctcgtgactatgtcaggaagcttgcagtcaccttacaagtgacaccagactttgcacagctcagagccaagtgggaagggacattccctggagtgtccaacctggagaatggcaggaccgccccccttcccccgcccccgctcctccctcccctccccgctcctccttcatatcattcctgagacggcagcctcccccttttgtgttgtcagcctcagttgttttctttgtcagcacccacttaccaagcttaagctctaattacacttatctgtgctgaaaattggctattaccaccatataaactcctaatagtaagaaatacttccttagcaaactgcagggaccactttccttgttatcgcaacagaacagacagtggacagttgcttctccaggctgaacccccttgtttcctttgcttctggcggctgcaggggtgagcaaggtggtgaccgtggaagtgagagggaactggcagcgctggctgaaggtgcgggacctcaccaagggagtgacctatttcttccgtgtccaagcgcggaccatcacctacgggcccgagctccaagccaatatcacagccgggccagccgagggtaagtggaactccaggggcagacaatgtcaattgcaactttagcctcccgcctcctgcttcactgagctgagatccatctacatggtcaacaaggtgatgttggcggccaagagctggcatcaactcggggatgtctgggcaacatggacgtcttcaaaagcacgcgtcaacatggagtttgcaggtggacttgttacatccatgggcacattgttaaatattaagcatgtcaagttttagttgtttttttttttttttgagaaatcttaagaggaaaataactgaatttggcatttgaaataaatcagaaaattttaaagttttccaggtcatggggaagaagcatgtaccttcccacttatccaactgttctgccctttgtttaaagacaggaaggcgtgggctgcagaaccggcattcagggagtgctgcttagtcccgggcacagtgtggggtgccctgcacctgccagctctttcaggccctcttcaggtttttttgttgttgtttgttttttgagacagggtctcactctgtcacccaagctggagtgcagcagcatgatcatagctcactgcagcctcaacctcccccggctgaagcgatacccccaccccccaccccgcctcaccctcctgagtagctgggctacaggtgcaagccaccacacctggctacttttttttgtattttgtagagacaagtttttgcaatgttgcccaaactcctgggctcaagcgatccacctatctcagcctcccaaagtggctttcaggcgtgagccaccacgcccggccttgcctccctgttattaagatgaaaaaccctgggtgcgtgaggttaagtaacctgcccagacactctgcagcctcgaccggtctgaccccccactgtgaaatctcacggggtgggatgtgagccccgcagggctgatgcctcacctctcttttcttctttatcccgcaggatccccgggctcgcctagagatgtcctggtcaccaagtccgcctctgaactgacgctgcagtggactgagggacactctggcgacacacctaccacgggctatgtgatcgaggcccggccctcaggtagggtggcaggccccacaaacggggtctcagcccagcggacggcagtgcttctaagactgtgtcgggggcttccatcactttctctttcagcattttccccccacaaagctgggaccaagagggcggttttggtgaaagaagacatccatggctcactcagctcctcccagtcttcatagtcacaactgtgcggttcaccttaagggcatacgctttgggatgttttagccccaggacacttacttaggatgataatggttattcctagaaacaggtgaatgagaacttagggacactaaaaggcattttcaaactcatccatgaatgttttcagggactcatgtcagggttctaaatgtttgctgccgagatggaaaacgtcaggcttgtttctgataatacgaagattcttattaatagtgaaaccgacacatcgtttgcttcattttttaggcttccgaaaatgaggtctaagatccatttccagccttattcaccagaataatttttttcacccttccttccatttgcctttaataactaaggatgggcattattgggaaatgagtttctgatcgggtgcgtcggatatgactgcttggagctagtgggtatcacctaacacagaaagcacggaacagctccaatatgaccttcagatggttgcacagttaatcatgaacatctgagcatgaaaatatgtgatgtgtcagggacgctattcaggaagcaaaccatcaaaccccacctgccaatctggcaggaccacggtgctaggaactagtttagtctaatacttaaacaggctattagaccaagaggaaagaccccaaagctacatctgtcactgtgtcaggacactcgttccctcctcccccaccaaattgcttttgaaagattattagttacaagtgctttctagaaacttctttattttatttttttgagacagagtctctttctgtcacccagcctggagtgcagtggtgcaatctcagctccctgcaatctctgcctcccgggttcaagcaattctcctgcctcagcctcccgagtagctgggattacaggcacccgccatcacgcccggctaatttttatatttttagtagagagggggtttcaccatgttggccaggctggtctcaaactcctgacctcaagtgatctaccctcctcggcctcccaaagtgacaggattacaggcctgagccacggtgcccagccgccttctagaaacttctaaggagaaacctagtgcagaagcgtgaaaaagccaaaggcaacataaacatttctttggctcaataactcagaaatccagacgtgctcgcctgggggaccctgagagtatcttttgagcagggcgtctgtcctgttgtggaaacagagggtcctgagttggtaaaggatgtgagtttggcaggggcctcctgtggtcactgcctgtgaaagcccatggcccctcacacagccagctggccctttgctaatgactttgattcaagagcactttcagagactgacaggagctgagacgtgtgggttctggggccaaattgaggctttgtggaggccaagggggagggagctggtggcagggagcagcccagacttaagaaaccacttcagacactttcctccccatatccagggagagcaccgatttcttcctcaactcttccagcctgggtgacagagcaaggctccgtctcaaaaaaaaaaaaaaaagtttctagaaggcacttgtaactaataatctttcaaaagcaggttggtgggggaggagggtacgagtgtcctgacacagtgacagatataacaaataggatccaggcgttcacaaatagaattcaggagatccgtgagcttggatggggaaaatacacattttattttcactgacctctaactagaatttggcatttcctgtaattatggatgcaggcacattcgttatccagggctgccttagcaaagtcccacaaactaggcagcctccacaacagacatgggttgtctcacagttctggaggccggaagcccacagtcaaggtggcagcagggcaggctcctcctgaggctgtgagggaggatctgtttcctgtaacctctcccccacttctggtgattacaggccatcctgggtgatctggggctgacaggtgcttcacccatctctgccttcatcttcccatggtgatctccctgtatgtgtgtctgcatctcagttttatcttttatgaggacgccagtcatactagactggggacccactctactccggcaggacttcatcctaactaattacatctgcaactaccctatttccaaataagctcattgggaggtattgggggttcggacttcaacgtatgaatttgcagtggggggcagagacataattcaatgcataatattagctaagaaaccacataactcatagtaggccctgtgacacttccaggagtactttcgtatgacttccccgccattgcagatatttcacaatgctgtttagatgtgtccttacgttgaaatcacagtcatttgtagactctctgctggaccttgttggctaatgagtccatgaagcgtagacttttgagttgtgctgggataacggtggccacaggtcacctaaacccaactcttcatacgtcttccaaggaaccacgtcgctaaacaagttagtgcaaagaaaaccacccataatccatgcctccagcattacctggagacacgagttcccaggaacctgcaggtgcctccaggtgatcgtaggcattaccagttctgtgactccgttctcacattgccataaagaaatgtctgagactgagtaatttataaagaaaaaaagtttagttggctcacagttctgcaggctgtacaggaagcatggtggctttgcttctggggaggccccaggaaatcatggggagaccccaggaagcttccaatcatggcagaaagccaacagggagccggcacgccacatggctggggcaggaggaagagagtgagtggggaggtgccacacgtttttaaacaaccaggtctcatgagaactcactccctattgtaagaacagcaccaaaggggtggtcctaaaaccattcatgagaaacccactgctgtgatccaaacacctcccaccaggcccctcccccaacaccggggacgataattcaacctgagatttgggtggggacacagagccaaacaatatcaccagtagaattggtttccttttcaattttagtttatatatctacaaccattctgagaaagtgtccttgagccaacagatcgccacagggacccatggtgccgagagcagattaaaaagcctgtaatcccagcactttgggaggccgaggtgggcggatcacttgaggtcaggagtttaagaccagcctgaccaacatggtgaaacccagtctgtactacaaatagaaaaaaattagctgggtgtggtggcatgcacctatagtcccagctactcgggaagctgaggcaggagaattgcttgaacccagaaggcagaggttgcagtgagctgagatgacgccactgcactctagcctgggcaacagagtgagactctgtctcaaaaaaaaaaaaaaaaaaaaaaaaaaaaaaaaaaagacacccgcactagaaaactacagaagggcctggctacgaaacttcctcctccctgaacgcctgcctccctgactacagattaaggatcccagcagatgggtggctgtcacagggtcacagaaggaggcattctggatctcgaccgcatccctgcccatgtcccagttgtgagactgcagcacagttttgcaggatgttaccactgggggacactgggtaaaggatacacagacttgctctccgttgtttcttacaaccgcttgggactcttcaactacctcaaaatgatatgtttagcgtcaagtaatcattgaaaaagccacggtgtccgtcctccccagcctgctcggacaagcacaccaatgtgtctttgagcactcttgtgtgggagagcggcctgtgggatggggcggtaccagccagacacgggtgcctgggctcagcctcttaacgctgtgaacacatctcagcattttccaggcagcgataaggcattggttctcaggcttgccgagagagcccttgactttctcctcaggttctcatatgctgctccgccggctgcacgaagggaacaggacgcctgttggttactggtgcggcccagggagcctggcaggccgtgcggattagaagtaattggcgtgtcggcgagggcttcacactgggcccacgcctcagagtggcttgcctaacatggagaagcttctgaagtcagctgagtctgagctcagcagggttggggccagtgtgtggaaactgacccacaggggaccaagatgtgacaacagacttatcaagaagaccccagctttttcggcgagggctgaagatcctgcacttaattctgcttggctgctcaacattcaaaagcaggtcgccaacgatctcccctttcggatcatgaagggaacccaagcaggccgcgggacccgtgttctttcatgggaagttgagacgccccctcccttcaatgattaaggccagcagcagctcaggcaaatgaaacgctttatggattgtcaatatttaagcaccttgctggtacctgagggctttggatctcagctgtcatccattacaggcctcattacacaaaacattaaatgctgtatcatctcattttcccaccgaagctccctggcaagacgttctccaggtggggtgtggtttgctccaggtgcaatgaatgggccccgttttgtattgggaggggccacacaggggccctcaccgctgggtatctgggagacgggcactcggtgccaggcagcccctctggcccacgtggtcggctcggcctgatgtctctctatccagctgagtctctaccttgcccctgggagacaagacactcatcagctttgttgctgctttgcagagggtggccagcgggcctgggcagcccgggcagatggtagtggagcgtgctgccctcccatccccatccttccttacaccccccgcacattctactgcatagcccctgttgctgtggccatgtggagacgcagaactgagcagcagctaatgaaattagcaccaggctagaacacagatcccctcttattcctggagagggcgctccatgagtgtgagcccaaggacaccgccaccagcttccaccagcatggcctggcccacacgttcctttctctggctgtgcgtaagtttcctccaaattggtgttgcaaaactccctggaaggcactggaaactatgcactggacatatgcagatgatctatttacacagattattctaaggcattttactgggtagatcatgaagcctaatttacatatttacacaatagactggaatgacgctaaaggaactataaatatattttcctctccaaagcagccatgaaatacatatttagaatgtgcccaatgcaggcagatattgtattgcattttttttttttttcttaaataatgtgtgtagcccagagacgagggcaggtggctggaggacaggtcccgtgcctgatggggacaccccccagccggaggcctggactgctgtccactcgtagtcccctgggggctttccagttccctccccattgattttgttcaatttcagtctttggcaacgggagttttcaagtgagtaaggaagaaaatcagtatttctctgaaggtttgacatccatagaagttccaagtcagcaggttcagcaagagggggctgttgccatggctctgatggtgcccggtcccctcatgtgctgcttgtctttctcataagctgcttgtctttctcataagcgtgtttctgacagcttgtcagcccggcttcccaccccttcctgggatcagcctgcaacacgggctttcttcgtcatcttaacatgcaatgcattttgcctcctgccttgaatgaggatccgatggaaggtaactgtcttttttttaaatcagatgtatttagcctcatgtttaagcgccaccagcttcagtaaaatttctaacctggattggccattcatacaaaaagaaatggcagtatttaagaaataaacaactgacaggcttgcatttgctctgagctgcagactgacagtcaagcggttggttgtgtgagtgcgtggaaccagaaatctcaggcagtgaatgacggtttcattcagcatggagaccctgtttaattgtccatgaaatcaaacttttgtattggcatgacgtcggccctaatacctgcagcacgcagctccgttctgggcgttggagggataaattgagtgcagacccttcgacgtgctgcgctgggctccagctcaattcagaaaagaggtgatcatgtttctgggtgtattaggacattgtctgggaacagatgtgcctcctaccgcttgggcggggggagatgctggcaccagaagctaacagctgactcattctgtcggctggagacaagcatggatggatagcagaacctatttatacagaaaagatttcttttttcaaggatcttcaatattagccacttacttcccttgtttaagtggacaaatcacgccgtaaaaaatgaagatgcatagttcatattctttaaagaaaagccgcctcaatgggaagctgaactggctcttgctttttcccactcagccttccttctgaggtggacaggattggaggttgtggtgacagcgtggcttcttcaggaatattttgcaaagtctctttctcagtggcttcccactttcttagtggtatttctccaatggcgtttcagtaacaagagtccaggaaggtgctctttcgggcagccaggaatgaaagaccaagcacgatagacaggtgtgatttgcagtcacatcaccatgagggcacctccgccctccacagacatgaagtggcaggtccagcccagaggtggacattacccacaggaagttcaaaccctgggcctcagcaggggacttgatgcctgcatcagtcattttgggggatcagtgatctggggatgtggctttttaggggacatgactgtcctcttccagccgggcattgcttttctcttttctttttgaaaccgagtctcactctgttgcccaggctggagtgcagtggtgcaatctcggctcactgcaaccttcacctcccgggatcaagcgattctcctgcctcagtctcctgagtagctgggattacaggagcgtgccatcatacccagctaatttttgtatttttagtagagacggggtttcaccatgttgatcaggctggtcttgaactcgtgacctcgtgatctgtctacctcggtctcccaaagtgctgagattacaggcgggagccactgcacccggcccttgcttttcctacaacggcaacacagctcgttcactggggaagagaaaccaggctggctcttccggacatcccagagagctgaccctagcctgggtgattgacaagtggctgactgtgtgcccagaattgcctttaaaaaggatgaggccctgctgtcctctcgagtgttgactgagatggaaatccaggcactggggactgtccagaacatggaaaaattggttgcataaatctcatttttgctaatagttctgtaatgttattttccccctaatttgtagagatacttttctccatcattgatttattgagatatttaacagcataatacaaatgagaaaaacaatccacagttgagaaatagagtggacgccttaccagctgccaaatttttttcttacccactcgtgatcgtggtgtaaatattagtacgagataagtagcccggtgaattatagctagagtggaaaatatgctaatttgggaaaggcagaagtaagcagaataaaaatgggaacattttcttctgttaattcagaaggaaattatctcggtatgacattccccctcacccaacatttttgagtgtaaatggattgctaaataaatcgttctgcgttaagattctgtatcaatattttaaaatgttattatgaaaaatgcacacaattcctggagctatgacagagtgcttaaaataaaatgtggcctttaggtgatggtacaggaagggagaatcattttttttttcctcaggagcaggaaagcattacagaaacattaatgcaaaagacattcagagaatccactccggaggtgttcagaccttctcagaacagtctgaagaaatccttcactttcttagtcccttaatttcaatggctttaagcaacacccagtttataagagtctgtatttggtctttagtgtctattacaacataaaattgtctatctttttagaggaaaaatacaattcattcaatatataaagcccttaaaatagagacttgctcacagtaagcagtaaataaaatagtggtggttattatttattgaaagcctgctgtactaggccctgagaaagcccatgggatacaaagaggaatgcaggggttgggggtgggacagatgggtggatgggtggaaggaagaatggatggataatggatggatggatggatggaaggagggggacccagaaggaaggaaggaaggaaggaaggaaggaaggaaggaaggaagggtgggcaggcagatggatgggaggtggatgagtgggtggctggtgggtgagtggatggatagatgaatggaaggaaggaaggaagggtgggtgggtgggtggattgatgggtaggtagatgagtagatgtgtggatggatggacgaatggatagatggataggtggatgggtgagtgggtggatgaatggatgaatggatgggtggatggatgaatgaattgatgaaggaaggatgaatggatggatggatgaatgaatggatggatgcctggatggatagatggatggatggctagagggaagggaagggagggcaggggagggaaggggaggaaagggaagggaagggagggcacaggaggagagggaaggggagtggagggcagggggaaggaaggagggagggaaggaaggaaagaaggttggttacatggatgaatggaaggaaggaaggaaaaatggatggatggatagaaggaaggatgaatggatggataatgaatggatggatggatgattacttaggaagatggatcatggaaagatggacagaaggatggatggatagatgatagctggagggaaggaaggaagaatggaatggatggatggttacatggatggatgggtggatggatgatgctaagcctgatggtgtgaacagccaggtaaatgtgctgatgtgatttagaagcccattggtggaagcagtcatcccttcctggaacgtggggtggggtcaaggttgacctcaaaaagatgagtctgagggggcaaaaggactcttgattttcctccatcccctgtccacaggctgtgcgtaagtcattagaacagcaatctcatctgattccctgatggatggcacagggtctgatcaaagagtagaccgcatttgtggatgaataagggagtgaggcaggggaggagggggcaacagttctccaggtccagaggaggcctgaacagagtaaatgcacaagccttccctgaccattcttaagccaaactcacatacgacaatataaaccacatacaaccagcataaactacatacagccagcaatctgtgtgtgaacctcagcatcctaggagaaagaaggtaggcttaggctctggcttgccattctgacattattagtggtgatgagtgtcttggtgagaaatggctgtaaatgagaatatttagaaataatggccaggcatagtggctcatgcctataattccagcactttgagaggccaaggcaggcagatggcttgagctcggcagttcgagcccagcctgggcaacacagggagaccctgtcactacaaaaaaaaaaaaaaattaacaacttagccaggcgtggtggcgcatgcctgtagacccagctatccaggagactgaggcaggaggataacttgagtccagtagtttgaggctgcagtgagctatgattgcaccactgcactccagcctgtgtggacagaggagggcccggtctcaaaaaaaaaaaagaaaggaagaagaaagaaagagcaagagagaaagcaatcagagagggagggagggagggaagatcagtattatactacctttctgccggtggagagatttgtacctttaaaatctcattcacgtctattcctcattaacctgtgactgtaaggacttagtcggtgcacattctaaatcctctgcaaatacagacagatacaatagcaattttctgcctatttactgttgggctaatccatctgagtgtacctggtgattccgggtgggtgataaggttggtttccggagcagtctcagtgcccataaagtagtcagcacgggtacacacatatccaaatgggttttccctcaccagattccctgctttgtaaaagatctcatagctgcacctagaaaagcaaatacagttcatgaaggattgctacttcaaatgaacattttggcctctgagcctactttttttttttttttttttttaaccaaacagcctccttagaattgaatttatacaaacacacgtacagcacttactatgtgtgaggcactgtcctaagcactttataaatattaacttacttaatcctcaaagcaaatctatgatgaagatgcctttgttatcaccattctacagacaagggtcagagaggttccgttctttgtctaaagccacacagctaattgaattggtggggccaggctttgcaaagaggctgtctagctccaggctccagcacccctttcagccctgatgctatagtgtcataagtttttttctttctttttttttttccttttttctttttttcttttcttttcttttctttcttttttttttttttttgttataatgtgaagtcataaaaattgcaaagttctttgtttgttttttgagatagagtctcactctgttacccaggctgtagtgcaatggcacaatctcagctcagctcactgcaacctcaacctcccaggctcaagcaatcctcctgcttcagcctcttgagtagtagtagggaccacaggtgcatgccaccatgcctggctaatttttaaaattgtgcatatatatgtttccctgtgttgcccaggctggtctccagctctgggctcaagcagtcctgtaaccgcagcctctcaaagtactgggataacaggcatgagccaccatgcctggctcatcgtgattctttacaacaaatctcactgatcacatttcttttgctctgtggctggagagatgcctcagaacccaagtcatgtgcctctaacatcctctctatgtctgattttaattttaaatttattaatggctttaattttgagtttattcatgttttcttatatgtgaggtttataataaatcatacatacatatatttactgtggggagatatgcataacctaacgtttcccactatgaccatttcaagtgtccagttcagtagcattgagcacgttgttctacaatcatcacaccattcatctccagaacgctcttcgacttgcgaaactgagactccgtccccattcagcactcactccgcatccagtgcccctgatgcctcatccagggctgctgcaagccgacccaccaggcaggtgcatggggctcgcatctgggacttcgcacttctaacctctgctctcgcctccccatccctcttgcagatgaaggcttatgggacatgtttgtgaaggacatcccgcggagcgccacatcctacaccctcagcctggataagctccggcaaggagtgacttacgagttccgggtggtggctgtgaatgaggcgggctacggggagcccagcaacccctccacggctgtgtcaggtaggccctcccagggaggtctgtcttcttctggaggactagagggagaaatggggtcgagggggacccagggaggtctgtcttctcctgaagggtgggagggagaaatggggtcgagggggacccagggaggtctgtcttctcctgaaggatgggagggagaaatggggtcgagggggaccctgggaggtctgtcttctcctgaaggacgggagagagaaatgaagtcaagcgggacgaaagggacacacatctgctgctgtaggtgtctccagcttagttgaggttctgcccagggaacatgtgggtggggagagcagtgccagtctccgggtgcctccccagtgccacccatcctcctgggctgctccctgcttccctctggcaggaccccaggccccagagcctcccccagcaccaccagcaaggccccttatgggctttgtgtccacgctgtgcaccggcaattcctaatgtgtttcctcatagttttaaaaatcagagacacatggaagtgtcagaggtgtgagcatgagccacgtggtgtcccctccgcaacaaaatcattcgcaaggaaagcagagccccgatcccctgtgttagctgacgcatccttgccgaggagcatgtgtgattttggaggggcaagaaccaccccggcagctatgggggagcccacgagtgcctgacaagaggtcacgtcttcctgggacctcccagaaagccagcggaggggccggggatagtagctgctctgggctcaaggtgagcagtattgccgtccctgaggatggcgtgcaggtgaaggtactgccgatcccaggctgggcatttcttcacgtgcacaccttcgctgtgaggtaccgcaggctccagaggccaccctgggtccaggtccaggtctgctctcaggggagtggcagagaaggccagggcagggcttcctccccgagagcacccgtgttagatgacagacatgtctgcagtcagcagtcatggcaggggttatgacacacagggtgggggctgtgacctcgcctgggaatcaggaaggtgcccaaagcctaccacaggggaagggaaacctgcaggaggcagaaggtggcggagaaaaagtcctggtcactgaagagccgtgggtgggggagctggagagggagggccggcaaagctggtccctggttgtggccccccagccccccatgtgcctgtgagggactcaaccctggccgcaccttagggttgcttgagaaagttaaacacacaccctcgctggcccctcaccccagacagtgacttccgtggctccaggcgtgactttctttaccccgcgatgattctatcgtgcagaccggctgcaagccagggcgctggggggttcagagagggatgggctgtgtttgaggagaggggatctcagcagcatgaagggcagggaggcctcggcgttggggcagcagagcctcagccagaagccccaggtagggccagctctgttggtcctcttcctgggattaggaagaagctgttcctctcctctgcgttagagctgcttgagctactgactgcacttgttgaaattgaacttaaccttcgtcctttatgtgctatgagtttggaggaacgaccctgtgctcgtctgtgggtgagcgtgggccctaagcctggtaccctggcctgggaacatccttgaattccggggttgctctgtgagaggggctgtgaggaagggacccagaggaccacctgattttattttttttgagatggagtctcactctgttgcccaggctggagtgcagtggcgtgatcttagctcactgcaacctccgtctcccgggttcaagggattctcctgcctcagctcgcaagcagctgagattacaagcatgtgccaccacgcccggctaatttttgtatttttagtagatacagggtttcaccctgttggccaggctggtctcgaactcctgacctcaagtgatccgcctgccttggcctcccaaagtgctgggattataggagtgagtcacggcgcccagctgaccacttgattttttaatgagtaagatttagaaaaagcacagatttctcatttccctaattttaattatgaatattttaaatgtaccccaaagtatagagaatgaggaaccctcagcacccctcatcctaattcagagatccaagatttactgcctgagttttatctgtggaaaattggtacagagcaattacacatgcacagaaagccggttcctcatgcggaacgtgcactttgaccccacttcccagggcctgtggttcaggcctctctgaaactccatcagacgcagagctggccttgccatgagctggaccgcactgagctcatcagtccttcagggaagccagcaaccatcacctgctggcgtcaggaccgggccaggcccgcagccagggtgtcctgccccgtatgagagtcctccaggacagcccggccttcctttcctaccaggtgctggggtcaggcccactccgggccagttgcccggtggtgtaagtgtggcatgcgtcagacttgccgcatggagtaccaaatgcgcagcccacaaacctacttctgtcttttggatttaaagcaccgtcacctcctaaggagccctgtgaacctgcattagccaaagccgattccctgttcttcttcccggtgtgcacacatcccctattcgtgagatataggatagaagcttcgggtggctgtgtttggaagggttctggctgccgtgagccaatgcctgggctttgcctgtgagaggctttctgttctggggggcttccagtgccacagaacctactccccttccaggcccatggaaggccctgaatgggacgccgggaccacccagcacccatcaagatacaatttcccgcttttctgttctgagcgagcagaacgagacagaaggaagaagagcgtccttcaaagccgcctttacatgcatttttttctattgatttctcaaaaacacatctaaagacagggccagtcgttcagcttggttttgctagaggcagaaaataaataaaacacagccccaggctttaggggtctgtggcctgtggaggggccaacaggtagagaagcaaatacacacagtgcgtgtttgcggcgggggcttccatagacgtgcagacggcaggtcctggggtgcttcgtgggctcagggttcaccccgtggctgttgggaaccactgaggattttaggggggacaactgatttctatcggaggaagacctctcttgggtgatgtaaaggatggatctgagcaagacaggaggaggcgtaacaggtggaatgtgagtgctgtgcgcaggcaggaggtggtgacggagaaggcaggggacctggagctgttttggggggtgtcccagcaccaggagagagaaggacgtctaggcgctttgttccatcctcactttaacccacacaacgtttttgtttgctgccttgcttgttttgtggagacagggtcttgttctgtcacccaggctggagtgcagtgctgtgatcgtggctcactacagcctcgacctcctgggctcaagtgatcctcccgcctcagcctcctgagtagctgggactacaggtgtgccaccataccttgttttgtagagaaaggggtcttgctatgttgcccaggctggtcttgaactcctgggcttaagccatcctcccacctcagccttccacagtgctgggacttcaggcacacgcctctgtgcctggctgtttttttgttttgttttgttttgtttgttttttgtttttttagagatgggatctcactacattgcactggatcaggcagtgtttttaaacagatgaaattaagagaaagcaagcaggaagggcggttttgatgggcaaggtcagggcaaggacaaagatactgaagtctccagggcagggggcagcttggaggacagaggagccctgagcctgatcccacagaaaaggtggcaaatgggggctgttgaattcccaaagcctgctgaggaccatgggagcctcctgagcttgtcccatgggaaaagtccacccgcccggctggacattggtttcatctcacctgtaactgggagttatctaccccagccttccctgccaaccacctgactcgcgggaggtgactgcagctggagcgtctgccccatgtcattgtgtgtccgtgtcttttccacagctcaagtggaagccccattctacgaggagtggtggttcctcctggtgatggctctgtccagcctgatcgtcatcctgctggtggtgttcgccctcgtcctgcacgggcagaataagaagtataagaactgcagcacaggtgcaggtccagccccttcctcgcgtgtcccacgatgccactcagccaaaacatagcgttcgttctctcgtggatctgccgggcccgtgtctgcttttccatttcatttgcttgtaggtgctgagagaaatgcaataggttttctttctgggggcagccaggcacagtgcagcaaacgctctatgcctcgggacccagatgctgaccctgcctgccctcagattaactatgtgtcttggataagggcgtatgagtcatccagcctcagagatccccactctgtacctttgttcaaatgcaattgctttttttttttttacagtctcactctgtcacccaggttggagtgcactggcacaatctcggctcacagcaacctctgtctcctgcattcaagtgattctcctgcctcagcctcctgagtagctgggattacaggcgcctgccactacgcccggctaatttttgtatttttagtagaggcggggtttcaccatgttggccaggctggtctcgaaatcctgacctcaggtgatctgcccgcctcagcctcccaaagtgttgggattacagacgtgagccacggtgcccaacctaatcacattttttaatagtattagaaagtgaggtgtgtctgggaatggtggcttatgcctgtaatcctagtgattttggaggctaaggctgaggatcacctgagcctaggagatccaggttgcagtaagccatgatcacaccactgtactccagcctggacaacaaagcgagatcctgtctcttttttttttttaatttgagatggagtttcactcttgttgccatggtgcagtctaggcttactgcaacctccacctcctgggttcaagcaattcgcctgcctcagcctccccagtagctaggattacaggcatgcatctccacgcccggctaattttgtatttttaatatggatggggtttctccatgttggtcaggctggtctcgaacacctcacctcaggtgatccacctgcctcagcctcccaaagtactgggattacaggtgtgagccaccgcgccctgccgagatcctgtctcttacaaaaaaaaaaagtatagagcattaaacaggtggcatattgtactatgcaatattataaacacagtgacctggggcactgctcagacgttgatgttttgctgtggctcagagactgtcacagaagcatctccatggcatagctcttctcacccactgcagcttgaaccttgcctgtgtccgtggtctagctctgagccgtctgagggccaggtcactactgtgtttccagcagaaactccacaccaggcatagagcaagcattcagtcaataagcatttattgccgaatgacccactatcattagagaaaggagcaaatgaacgtagggtaaagccagccacagagagcacagaccttgtgactccatttacatgaaggccaggaacacccacagtgaatggaagtttccagaaggcagaatcctgcttgcctgttggtggagaggtataaacagggaagatgcatgagagcacctcacaggtgctaaatgtgctctgtctctctacgtggacggtagttacattcacaatcataaagcatcattctggacacttaagattagcatagcttgtgcatttgattatcgtcaattttaaaaacctcataattatcaatgagaccacttctctggataaccagaatgtaactgactgctagaccgcagcctgttttttgttttttaaatagacgggtttcaccatgttggccaggctggtctcgaactccagggctacggtgatcctcccacctcagcctcccaaagtgctgggattacaggagtgagccacgcacggcgcccggcctatggcctgttttgatcctacggagcatccaccagagctgtagctgagcccaggaatgtggtcacttctgtgatatcaccacaaccgctgggccagacctcttcctgagctcagctcatttgttggaggttttcccatcaactgggtcttctctttttggaaaggcagatccctgatgagctgttcttaaaaagaggagctggctacattagccccctgagccaaggagccaggcagagtaggttcctgaccccgaccacaagtcctaccatccttgtgccaaaggggttaaaaaaaccagtcacctaaaatgcctccttatttgcttctataatgttaagcaattcatccttcaaagaaaggatttatttttttctgtataaattcacttctaacaagtgttcgtaaatcagattttattcctgagggatttacagtgtatgaatggcgtgtcattttcctgagttaatgctattacagaatcctgtgtctggtgcatagaaaaatctccctgcttttcactgtcctcctccatctggaaaacagacttgaaaaggcagatcggacctgcagcttccgatgctcagccgcaccctggagtgttaatttaacatcataattgaagccgggaaaaaataacacttatctaccagaatgtctcccgtcctgcccaggagacattgcagaacttaaacctctgttgtgatggcctcactcgacacccctccctgcgtgcactccttatcctcccatcctcgtctgaattcctttctgatcttggtttccacctgctcacctcccatcatcccaaatcccctctcccaggcaagcccatctttcattttctgctctgtgttcttccgttaaacacagagcattaaggtttaaagcacgtcaaaggggggccaggtcccagcagagaggagcctcttggggtttagaaatgccaacgcacttagcaaatacctgccaagcccctggtatgtgtgtaggcgctgtcctgggggctggcgggacactggggagtgtgatggacttaagtctgtacctcaaagagcaaatatgtacatgggcctgagaaacagaggtcactttatgtggtcagggaggtcgcctctggtctcagggcgtttgagctgtgatctgcaggaaggggagagaaacccgggaaatactgggagaaggagcttccagcaagagggagagccccagggggagaaacccgtgttagggaggggctgagggctggaagatgacgcgggggtttgcagggtggacagaccaggccaagcttgggggcagtttggaggccttggtctttcctgcagaatgagccgggaaaacccagtgcaattattttttatgttgttcggtttttcagaactttatttttattcatttgatctgttaatatattttagaatgtgttttgctatgtatttgtaaatttactcttttttgaagtgtgcggttcagtggtgaacgcacaggtacgtgcagtcatgaccacagtcagttctagaacgttcgtgtcacctcaaaaggaagctctgtaccctttctttagccgtcacactcccacacatttatctttacttcctgttttgttaaatgagtgtgagtttttattttgaaatttattaaatatttaatttcccggaatttttagaagtgtatgcattcttggccaggtgcagtggctcacgcttgccatcccagcactttgagaggccgaggtggaaggatcacttgagcccaggaactcgaaaccagcctgggcaacgtagcgagaccccatctctaccaaaacaaacaaacaaaaaatcaaaaaaagtttatgcattctgagtctattttcataaaacactggcaagaatactggtattttgggatcagacagaacaaatatgaaaatgctaatattgtcactttgctccaacactgtgatcagtacctagctcttctccccagctcagccctaagcacagctgaagcaggtatcctcagctctgggctctgcgtgcagcaggactcaggagctgccccgctggccagctctggcttggcgtggctgcggtggccacaccagtaacacgtctgttctcactctcctgctgggctttaggaaaggggatctccaccatggaggagtctgtgaccctggacaacggaggatttgctgccctggagctcagcagccgccacctcaatgtcaagagcaccttctccaagaagaacgggaccaggtaggcaggcagtgctgtgctgcgcccacctggggatctgagctgccagggctggggtggcagcccacgcccactggcacctcctgcatcccgccctgtggttccaggaagcaaaacccaacccaccgccaagtgcgctcccaaaccaccaggggcagccctgagtctaggagggacggggtcggcagagcggctggaaatattttcaggacatctccggagatttagaaagagggtctcaggtgtgtgggaagggcctggaacacccaggggctgccaggctggccttctgtgtcaatcgcatgcaccttggatctgggcgttcctagttcatggaggtgtcacctgggctgccacaggcccgaccaggtgtcctcgcaagcaagcctggtgcttgttgctgatttcattgctctgtgtattccaaagttttcctgtgccgatacacattgccattccatacacggattgagtgcaggcgagaaggattttcatcaccatagcctccttagcttataatccttttcctaaatccagcaggaagcagggtttcccaaacaagagaggggttgacctgggtttgcctttttgatgtgcagagcgccatcctctgatttgagtacccttgaccaaggagaagggccaggaatggggaggggtcttgagcgtctggaaggaaaaacccaaacacctgaggacgcttcgtctggagaacagacagctccgggctttcccagggtgccccagcatcggggtggaggaggcttctctccctcagccagactcaccttggattagactcagctgcaagggtgtggaaatcacacatcatccagacccagacagaccccagggtttcctcttccctttactgtttacaaagctgcaggggccagcagtgtttggagattccctgggccgcccccgccctccactgaatttgggaatcttagatcactcgggtggcgccgaggcacgggtgggccttctcccagccactgacgctctgccagccccacaggtgccagtccaaagcaccgcaggccgccaccccacgaggccttcccaagggctggaggtggatgctggtggtgacatctggtcacacctttcatttcatttgtctactgggaggcaagtttttcctgccgtgtaatagaaacatgaaaaagcaaccacatgtagtttcaaggccaggaggaacttgtcacagagaattttaagatattacatgccctgcttccttgctgcaactctgtcttctgagttctgagaagagacacagccttgaagcacattgcccaagaatagacagtcgttcagtttgttaagtccatctgcttcctaggaaagagaaacatcatttgatggtgaggttggaggttctcagcccacaaagacccaaggacaaaataaaattaagatggaaaagaaaatggacccttcccttaggtttttaaataagccatcaccttttcagtcctagcaataggaccctgtattcatctgtcctcacgctgctaataaagacatacccaagactgggtagtttatacaggaaagaggtttaatggactcacagttccacatggctggggagacctcacaatcatggcggaaggcaaggaggagcaaagtcacgtcttacgtggtggcaggcaaagagagagtttgtgtagggaaactcccctttataaaaccatcagatcgtgtgagacttattcactctcacgagaacagcacgggaaagacctgcccccatgattcaagtacctcccaccaggtccctcccacgtcacatgggaatgatgggagccacaactcaagatgagatttgggtggggacacagccaaaccatatcagaccccacatgtgattgaaggaaaggattctctgctgagaggggaagggtctgggcagggacacctgagattggtcctgtagcatcatccccaaaatatcttagaaatacgggcacagttgatttatgtctcccccgtgcacgtttgtgcttccaatttctttttggggaagacaccattttagctccttagataaaaagatttacccaaatgtttagataagaaatggcatctttcccaaagtaaattacctttgagatagagaaagaaaggcccttgagccttcactgggcctttccaggagaaactgaggcacaccctgggggagacaacacccacgacacaaaaccagaggtctccatcccctccagccttcccagcagagtctccacccaaggcctggtttcctggcctgtagcctctccttgatcacccagtgttacttctcccattgagggatgagaagacacttcctctgtagctgccactcagttctgcactcactcctcgcagcatgagggagggcttgctgggttgctgggggtcctggacatggtccctttgagcacacagctgcctgtctgactgcccacaggctgctctcactatcgagtccctgcacacccttcggaggactaaggagcactcagtcctgcctgatgtgaaaattcagcaatgttgtactcagagtttttccccaagttctgagttctccatctgaaaaacagaagctgggcttttactcagctcagatagtcaccaggaagtggggagctgaagagggtactcattttctatcgctgcatggcaaatgatcacaagttcagcagcttaaaccaacacccatttagcaccacgcggtctccctggggcaggagtctgggcacagctcagctgggtcctctgctcagggccttgcatgggtgtaatccaggtgtagatgggctgtgttctcatctggaggctcaactgggcaagaatcttcttccaagctcattcagcctgctggcagcatgcatttccttgtggccgcatgactgagggccccagcctcttcttggccctcctctggaggccgccctcatgtcctggaggccgctcatggtcccctgccatggggtcctctccaggggctgttcacaacatactgttggcttctgtgaggccagcaagagcatctctgtctccagtccgccaagatagggtctcctaatgtcatgtgatcatgggcgtgatgggagtagctgtccttcacccattccatttaatgtaaccgagtcttcagtctgccatgttccactggttagaagcacgtcacaggcccttcccacattcaaaggatgggatgatgggggtgggggcagtgatggagccatcttagaattccaccagccagagaggacgaatgctcccccaccagacagggagaccaggcctggtgcaaacttccccaattccctctcatctgtaggagacaattcccactccttagcatggcagatcagactgttcctcatgactccatcctcatctctctccactgcactcccctgcctgcatctggcaagcacctaagctccccggcctcctatctgtcccgacctcagggtgctgtttgtacgtgagtgtctcactgcccctcctggcacagaccagctcttcctccatgcctgcaggcctagcacagtctccacaactgacaggcacaggtacacagaggctgttgactcaccaggtagccagtgctcagaattttttgcatcagttgccaaagtgatgtcaaaggctgtgggtttcctcttagtccaacgcaataaaggccaaatgccaggttaggagtcctccggggaagggcgtcttttgcccagagggtaattgcagcatgggtcctcatcctaggtccccaccccggcctagccccggcggcctgcactactcagacgaggacatctgcaacaagtacaacggcgccgtgctgaccgagagcgtgagcctcaaggagaagtcggcagatgcatcagaatctgaggtcagtgtcggtgcctacttccgggcagtgaccatcagcccctacttctgcagtgagacttctgccccctcaggctgtcttgtcctatttgagtctcataacatccccacaggcagagccaaggacaaagggcttcattatgcagatgagaaaagagccgaaattcaaccccacggcctgctctgggccccgcagagctcacatagcctcgagcagtctagacattccaaggctgattcatggaggagcaggttgtgactcctaagtcctgggatctgctttaggcccagcagagctcacacagcttcgagcagtctagatgctccaaggctgattgatggaagcgcaggttccgactcctaagtcccagagactgcagtgagagataggcaaggctggtgccctctgtgagaggtttcttgcagagcagagtgtgggtgttgcctgggtgccagcaggctgagtgtcagatggtcgctttcacgtgctccatctcatgtagtcccggggtaactgggcctagaccacctcttacagatggagccggcagggctcagggaagatcagtaactttcccagtgtggactcctgcctcggaggcccattctctctccatttcactttcatagataaacataggctgccataaaaattggtggtctgtagaccccagttagggtggcagcgggtctgatcctgcagggcggatagaaaatgtgacccctttaccagataggagcttcctgctcacccctggacattcgtttccccctacaccctgccagcctcccaccctgcccaggaagcttctgtcctagctccctcccttgcgctgaagaagagggatttgctcacagcagttccaggtcatgtatcgggctcagggtgaatccagacttgggatgtgttcctctcctcaccaagcagctggaccagggagatggcttccccgagggagtgtcagcctccacgcgctccctccaggaccccagggcctacccgcctcaggcctcccctgcgcctgggtgtgcagcagttgagacatggagtgtttttcctgtgccaggtcctgtgcggcgtgacccaaagggactttaaccagcaaggcagccacgagggggctctaagcagggggctcaacacaccttccctacaggtgcaccatctccgtttctcatacttaccagcaaaagcagcagaagcagcaattggagaggttgccccttgggtcctgaacttttttcttttggatatgccaggcctggagaggggtgaaaatcaccaaccattggctgtacacataggcctgccccgcctcctggcactcaggttctaaatcaatatttaatctaaaataagtctcaccttcattttaacctgaattcaggccttattgagccccggggctctatcgaatggcttcttttcaactgtgggttgtagatgaactcccggcgggaagggccagcaggtgggtgtggtgaggccgattctgctttgctttgcgtgttctgtttacagaggatgccgggtttgctgtccgcaccatagccttgggcttggcagaaacagcaggcagcaaagcagatgctcggaaagggacatttgtctaaaactcaggggctgtcaagtgaaatcctgcaaaactacctgcctttttgtgataaagaaaaagcttatcagaagctcgctgcatgtacgaaagcagcaggttgtgcggagcaggcagccttcgagcaggacagtctggtcagcaaagaggctcatctcacagcgccggcctcgggcctgtccctgctgccgctgccgggccgctgctctttcgagtatccaggcaccgtgggggtgtcatagctgtgggtggttcctgtgtgctgagcgctcgctgctgtgtgtttccagcactcactgtgggcctggcccagggtgaacgtgcactcctctgctgcccaccccagccccatgaggtggggccagtctccttattggtcagaggctgaggttgtccagcaggcggctgttgaagctgacacccagccagacccccgtgtctccagagctcagtgtaccccttccctccccattggtctcctccagccccacaccagaggaaggggagggaggcatccagggatggtgtgtcctagagcaggcgggcaggattggatctgtgaactctgaatatttgttcctaaaagcattttcaacatgggctaatggaacgcatttggtctgtttctccccccaacatatgtggcgtgtttggagatttaacatcggcaaatgtttatggaagattattgagcacacccgtgaactgagctaagcatatacattcacgtatgcatgcacacatgaacacatatgtacatgtacacacatgtgcacggacacatacacacctgaatacatgcacacacctgcatacacacatgcatacctaaatagaacacacaacacacacacctaaatacacacacacgcacacatatctatacatacacacatgcacacacatatacatatacacctgaatacatgcacacacacgtttacctaaatacaacatacacctaaatacacatatgcacacatatgtacacatacacacatgcacacacgtatacctatacacctgaatacatgcacacatgcatacacacgtgcttacctaaatacacacaacatatacacacctaaatacacatatgcacacatacgtacacatacacacatgcaaacacatacatatacctatacacctgaatacatgcacacacatgcatacttaaatacacacaaacatgcacatacctaaatacacacacatgtacacatacctgtgcacatgtacaaataactacacacctgaatacatgcacacacatacatgcacacatgtacacacacgcacacgcacatacccaaatatgtacatgcaaaaatttgcatgtgcacacatacatcatatactcatacatatacctacatacctaaacacatgcacacaggcacatggctcacacatactacatgcatgtacgcatgcatatatacacgtgcatgcatacctaaatacaagtacaagcacacatgcataccaccatgcacacatacacatatgtacatacatgcacaacacatacatacctaaatacacacatacacatatgtacatacatgcacaacacatacatacctaaatacacacatgcacacatgcctgcacatatgcatatacacctaaatacaaacacatacacagaggtggcctcagggagggaggtgagtgtggggagggagggaggtgagtgtggggataggggaagaagggtggagggcaggacatggaacccacactaaatggaattctgcacagagggtgttatcatccttatgtaacaggcagaaagccgagactgagagtttttgaatgtcttccctgagacacgcactgatgagctggactggagaggcagacctcagcatctaactggaaatcccaccttcccaccagtcctgctctcagagctgagtctcaggcagcgtggctgaggtggcaaggggcctgggaaccaggccacactgctcccacatggcaagccctgtgctggaggaaagcgttcctgcaaatgcacctcatggttcctagtgccttttgggtgacaggctgcttctggaggctgatgaaaggtgcagacatgctctccacctacatacaggcagaatttcacctaggatttgggggcccaaggcaccccggaagtctcttacagaccccaccagctagcatcccatagagtcccagctaagaatccccacacctggaccatcctgtgctccccaggtttttgagtggataaagcgtagcctcccttgtctgtagagctctttgctaggtaaccttgctgcatcctgcttttgaagcttatgaatttgggggatttgaaggcactccatattcatgggatcccaacagagggaaccggggacttagatcgttttggaagtgccagctcacatggtaacattcactttgaaccactgtttgaaacagctggattaagacctaactcacatgtcatacaattcactcatttgaagtacacaattcagtgggtttcagtacattcacagagttgtgcagccatcaccacagtcaattttagaacatttccatcagcccccaaaacaccctgtaccgattagcagtcactcctcaatctccccaaaccacccacatacacctgcagccaaccccagctcttggcaaccagtaagctactttctacctctctaggtgtgcctatgtggacatttcatctaaataaatcgtacagtatgatgtcttttgtgactggcttctttcccttagcatgatgattgcaacgcatttgaaccacttttacgaagtaatcaatttgtgtgtttcatcagttctctttcacattgtttgttttaaaatctgacttcagaacttctccctttataggaaacaaacatgttgtattttgcccatgtggtttcttggaacagaagtgtaatttttttttttttagatggagttttgctctgtcgctcaggctggagtgcagtggcatgatctcagctccctctaacctccgcctcctgggttcaagcaattctcatgcctcggcttcccaagtagctgggattacaggcacctgacactatgcccagctgatttttggtatttttattagagacagggttttgccatattggccaggctggtctcgaactcctgacctcaagtgatccgcccacctcggcctcccaaaatgctgggattacaggcatgagccactgtgcccggccaggaagtgtatttttctgtgtagggtctaacggaacacaggccaaatgtcacaaggggatttggaaaggctgccatcttgacaattatgtccctcctagtccccaaccccactctagtcagaatcttctttttaaaaaatgctttattgagttataattcatatatcatataatttgcccatttagaatatacgattcaatggtttttagtattttcagtttttgcaatcatccccacaattttggaactttttcatcgctctaaaaagaaaccccataactctaccagtcacctcccattcccttctccctccaaaccctggcagccactttctgtctctatagatttgcctatcctgagcatttcatataacagactcatgcaatatgtggttttgtgattggcttatttcattcagcataatgttttcagagttcatcagggtcactgatatatgttgtagcacatatcagtacttcatttctatattatatggggggaaattccattgtatggatataccacatttaaaaatgcattcatcagttgatgaacatttgagtttgttgtgtctgggatccccaagagcactcccaagttcagtgattcactagaaggactcacagaattcagcacacaacatcctcatgactaagatttattacagcaaaagaatacagagcaaaatcacaaagggaaaatgtgcacagagcaaagtccagaggagaccagattcacgcttctaagagtcttctcctatagaggcacacagaacacacttagtcctccaccagagagctgtgaggacacataggaattgttgtctaccacggctttaccatagccttgcacttatagcaaactgcaactgcattgtaggtactgctgattagaaactcactgcccagggtttttatcggaagctggtcacataggcatcctctgccaagcatgtaccaaaactccagactccagaaagaaagcaggtgtttggcataaaccatattatttgtacagtttagacactgcagtcttataatttagggaaaacattttatcaatgaaaggaactttttaccagtcaagttcccagatgccaaccaagggtaatctttgaaagcaggtctttttaaggctagtggtctcagacctgctctgttaactttcttccacaccagattgtttctactttttggttactgtgaacaatattccctttatctggttgagtttggtgagtgtttttattatcgaaaggtttggagttttgtcagatggtttctctgtgtctgtctggatgttttttgtcctttgttctatttatatggtacattacattaactaatgtttggatgttaaaccaaccttgcattcctgcaataaatgcccattgttcatagtgtataatcctttctcttttttttattatacgttaagttttagggtacatgtgcacaacgtgcaggtttgttacatatatatacatgtgccatgttggtgtgctgcacccattaacttgtcatttaacattaggtatatctcctaatgctatccctcccacctccccccaccccacaacaggccccagtgtgtgatgttccccttcctgtgtccatgtgtgctcattgttcaattcccacctatgagtgagaacatgcggtgtttggttttttgtccttgcgatagtttgctgagaatgatggtttccagcttcatccatgaccctacaaaggacatgaattcatcattttttatggctgcatagtattccatggtgtatatgtgccacattttcttaatccagtctatcattgttggacatttgggttggttccaagtctttgctattgtaaatagtgccgcaataaacatacgtgtgtataatcctttctatatgttgctggattcagttttcaatattgctgagcatttttgtatctatacttataagggatataggtctgtagtttacttgtcttatttatctttgtgtgatttttatgtagggtaatattggccttattgaatgatttgggaagtatttcttccacaactggtattaattctttaaatgtttgatagatttcatcagtgaagtcctctggtctcgggcttttgtgtgtgggaaattgttaattactagttctatctgtttattggctatagatttattccgtttccccccccctctttttttttttgttaagtcagtgtcactcatttgtgtctttctaaggatttttaatgctacctcattaatctaatttattaagatacagttgcttatagttgtgtacagttgtttataatccttcatttctgtaaaggcagtggtaattaatatcaataattcattcctgattttaataatttgagtcctctctcctatttctggttaaagttttgtcaattttgttcatctttgcaaagaaccaacttgtagtttgattgattttctctattatttttctactttctatttcatttatttctactctaatctttatgactttcttctgcttaatttggagttaatttgctcgtcttctttcaatttcctaagttggaagtttatgttgttgatttgagatctttctttttttgtaaatacaggactttatggctaaaaattcccctctaagcactgtgttagctgaatctcataagttttaatatgttgtgtttttgttttcactcatctcaaaatatttttttaattttctgtgtaatttcttctttgacacattcgttatttaggagtgtgttttacatttcctcatatttgtgaatttcccacattttcttctgttatttatttctaattatatcctattttggtcagagaaaccataatttatatattttcagtcctttaaaattcattgggtcttattttaaggcctggcctatggtctatactggagaatgtttcctatccacttgagaagaatgtgttattctgctgttttggggtggagtgttctgtatgtgtctgtaggtctagctgatttatcatgttgtttccatcttctgtatgtatgatcttcttcccagttctgccatttgtcagtgcattgaaatctctatttgtattgaattgtctgtgtctcccttcaaatctattcatttaatttcatgtattttgaggctctgttaggtgcatgtgtgtttatagttatatcttcttgatatatttaccattttatcagatatttgctttctaataaagatatgtctcgtatctttattccctattttccactatcagcttctttttgttaaatgaattttccaaatatatcattttgatttccttgtttttgcttttgctctatatttttggatatttttgttagtgtcttactctagtattattatctacctcagatttatagtacattttcataacttatgggaactttactcctatagctgtatttcttccttttctttttgtgctattactatacatattttaccggtagattaatgatttttatcaaatttgggaaactttaagtcattattactttgagtgtttttgtttttgtttttgtttttgtttttttgcttttttctctttctcctctcattctgatattcttattatacgtatgttggtgctgttagtgctgtcttatatttatcaaaggctctgtccatttttaaaagtcttttcttcagactgcgtaatctctatcaatctatctttaagtgaactgattctttcttctgccagctcaagtctactattgagcctatctaatgaattttaaatttcagttattgtatttttcaactcaagaacttcccatttgtgtttttaaaataatttctatcactttattgatattcttcaattgtcatcatacctttaattttttaaacatggtctcctttagttctttgaacataattataatagctacctttgaagtctttgcctgcttagtccaatgtttgggcaccctcagaagctaccttctttttttttttttttcctgtgtatgcattatactttcctgggtttttttgaaaacagatcatttttggtcatatattgcagcaactctgaataatgatattcatgcctcattgagggttattgttgcttgcttgtttgttcagtgatttggctagattcattcagtgaagtccatttcccctgcactgtgtgtgctctcatgttgctcctcagtcttgggcaatgcatagagtcttgctgcctaccagggatgactgtggttttagctgggctccctttgcctgtccccattaagattctggatggtttaccatgattggcgtcatacccagcagttaacctccactacgtgctagctctggttttctcagcaatgccttagtgcatagattgctcctcactttctgatccagttgaagtccagcctttctgcagttgccagatgctgtcagtctttgaagcttgctctgacactaagaggcctcttcttagcttcagaagtctcttttcctggttctgtctttcaaactgctagctggttttaccgcttccattgttgctgacatggaactaccagcttcctcttcattcctcacctccaaagcctccacagttttcaacaatgtccttaggtatgctctgttccaaataaagtcattttcctcagtcagagctggaagctctctgttcttacagaataactctccactctgcgcaggacctctgtgtcactgcatcaaagtggaggtgaggacaatagccttcttcttccatagtgacacacccgctacacaagtggggcactgggttgagagggcagtccctggacttttgggcctgctcctcccagcgtgggacttcttcctacaaacaagctggggtgggagcactcggggcccagtattcttggcgtaccatacctggtacaggctcccagcttacaagcaaaggctggatgcgggacaggagccccagtactcttggccatctctgcctagaatagagcttcttcaacatggagttgggttgggggaaaggggaagctggataagagatgccagaactttcctctccaagttaaattcctaaaccagcagccctgccttgttgccacatctgcccagggtggaatttctgtcacactgagctgggggaattggatagggagagcaggtcatggctcaagcaccacagactctcactatcgagtgagatttagcgcagatcttgtatcaatctatctttctccatttgctatctactctgagcaccatttccaaatactttttttttttttttttttttttgagagggagtcttgctctgtcacccgggctggagtgcagtggtgcgatctcagctcactgcaacctctgccttctcagttcaaacaattctcccacctcagcctcccaagtagctgtgatcacaggtgtgcgccaccacacccagctaatttttgtatttttagtagagacggggtttcgccatgttggccaggctggtctcgaactcctgacctcaagtgatccgcctgcctggtcctgtcagaaggctgggattacaggcgtgagccactgcacccagccttcagagattttagatggttatttataaaatacttttcaccagttaaatcattgttccgctggggagagggtctgctgacctcctcacattgccattccagaaatatcctggccttcatggctagtaactctgatattcagaggggactgggaagaaatgtgggctttggcctggtgccttaactccaagtttacagaaacggaatccagtcccagaactgcagaaaaggctgttagagaagaaagcattgcagggaaagcagaccgagggttgctcagcaatggaataaacccaaaagctgtagcattggttttcaaataggactatcaaaaaagtggcttggatttcgacgagggtttaagacgtttatcctctctactggagacagcttgtagatttgagtacaatataaaccgaaatgttgggaataaagagtaatgtacgtcctcggccctggcttcaagccagtgttttgacacagcatttttgttggtgaaagccgtggacagaggcaggcttctgctcaccgtcttctccagggcccaggggataaggagtgagaagccctttgtggtctctgctagaaaaactctcctgagaagcgaagatttcactaagaaaacagtgaggccatccttttatcccccaggacatttttaaaccactctcagaactattgctaaagtgaaaattctgcagatccgttcccaggtgctcaggagccttcctgatcggaggtgctcctctgaattatgtcctaagtgtcacacgacgcatgctgtggctatttctgtttttctgtttagaaacaagagggtttgtcacggttttatcacatggctgcttctgaatgatatctgccgttcaaatcacatgttaaagattgttttcgaaatccaaagaaactgttttcaaaatccctcctgctcccaccagcttagaccaaccccatcgtacccaattaattccttaataatatttgagtctttcatcttgccaacgtaatacccaaagtgttgagattatctttattagctgctttccaggcgtctgtgcacctttagaaactctcgcagtcggtctgatactgcatccaatcactttctgtccttctacagtttcccgggaaaccgacacacgttgctacttcacatcacacaggaaacttaccaaaaacagactctgcagcatttccattttgtcaataattctaactcactaaaatacatccccattaaaaaataataatgtcatataaataataaacagagcaggcagcaggaggaagaatgacattttaagattgtgctttctcaaagaggcaatgacaggggctgagcaggagccaggaaacccagcttttagcttcagctctgcctgacatttattggtcatgtggctctgggtgtattctcacttctcctccctaaatagcaagaaggaaaagcctcttggagcctcgtgtctctgcttctttctgtacaatggttatgttctgtccgattagctgttattatagaatcacctggctgggtctgtgggcactggccactcagaactcacggcctcccagctttcctccccagaacaaagcactcttcccttccagctgcattgtgaaaaatcccaaggcaagactctgattggctgagctgaagccacatgcccagctattagccaatcacggttttctgagaggcaagctagcctatccatgtggtggggaagaactgcttccttcaaagaaggggttgaggcctagacacaaacaacaggaatcactgcgagttggacgaccaagcactcccaatttgtgtctcccgccaggcccccttcttggcacccacatgtgtcacagacccttctcttgagactacaggacttttagatctttggctgaggaaacatcaggatacatagcaacatatatacaagccgtgaaggaaatggtataaacacgcagatgggtgtgggccatgtgctacactcattctctaagcagttctggacatgctcttggaaatgtggactccagtgagagctcagcagtcccttccgaaccacccctaggccccacccagtgtgaaccctgcttccctacagcctggcagctgcaggaggaggggtgggcaggggtgtacacagggcagagagatgcccaaagggtcaccgagtgggtgcaagacagactaactgaattcgtagcatgccctcccactgaaattgctgatttccccaccatgcagagacgctttccatataagactcacccatataaatagcgtttctctatcttttctacaactggggttgaaggtatctcctccctgctactaaaaggactttatttctgccacctttggctgagaaaccaggctggttttggccccggtctggccccggccagtatgaccctaagaaggtcacttgcatttgtggatgttgattgtttcagacccaagacgaggaaattgaatccagtcaccacttctctcgtttttccccactaggatcccttgtggtagggaagttgaatggggaagacccccgggacctgggaatatagtcaaaagagggtgaaagtcttgaacctcatatttgaccttcagatgataatgaaccctaaccccagtttgtgaaacctagcactaaatttctgtcattcgttcctaaatattctgtgaatttctcgtgagaaaagtgattccttcactatatttcaatacatgtgattttccctaagtttcaggaagtttagattccaagttggtctctaaagaagtaacaaacccaattcaggggctaatcatggagattcctttggcttccttcagatgatctttgttctcttttcttccgttttagtttacgcagagcttaaccttgtaagccacctcaaggcccctagaaaacagatgaagaataaatcttaaacaggccaggtgcaggggctcacacctgtaatctcggcactttgggaggccgaggtgggcaaatcagctgaggtcaggagttcgagaccagcctggccaacacggtgaaaccccatctctactaaaaatacaaaaattagccaggtgtggtggcgggcacctgtaatcccagataggaggctgaggcacgagaatagcttgaacccaggaggcagaggttacagtgagccaagatcgtaccactgcactctagcctgggctacaagagtgaaactctgtctcaaaaataaataaataaatcttaaacagccacaaatacagatccctgatctcttagctgaaacccttgaggctagatatatttaagaatccagtgtttctcaagtttgggagtacatcatatattagggaactgctccagtagggccgggccagcgcttggcgaccaaacacattggtcttcttgtagcagaatatgagaatattcacactgaatagccctacatcagctcacctaggggtaagctgccaggttagctcaagtcagctcagccttcgccaccaaatgagttataaaaaaaccttttgagtttcagagcgttgtgggttttggaatttggaatggagggttgtacacctgttgcgcggatcctagagagaagcctggaactaggaggaagttacaggatctgcggaggtgggtgaacccgaggggttggggagctcaggtgcaggctcccacccagcctctctcgctgagccttgcttctttattcataaagtgggaattgtaacatctgcatcataggatcctcagccagttgcagagatcatgcccgggcattaatctggtatgtaatcggtgttcccgaaaaaggagccactgccacgtttatcatcgtcacccgatgaaggagaagctggctgctctggggtctctgtgtgtgtgggaagatgtgttcatcgtcacctgatggagaagctggctgctccggggtctctgtgtgtgtgggaagatgtgttcatcgtcacctgatggagaagctggctgctccggggcctctgtgtgtgtgggaagatgtgttcatcgtcacctgatggagaagctggctgctccagggcctcggtgtgtgtgggaagatgtgttcatcgtcacctgatggagaagctggctgctccggggcctcggtgtgtgtgggaagatgtgttcatcgtcacctgatggagaagctggctgctccggggcctcggtgtgtgtgggaagttgtgttcatcgtcacctgatggagaagctggctgctccggggtctctgtgtgtgtgggaagatgtgttcatcgtcacctgatggagaagctggctgctccggggtctctgtgtgtgggaagatgtgttcatcgtcacctgatggagaagctggctgctccggggcctctgtgtgtgtgggaagatgtgttcatcgtcacctgatggagaagctggctgctccggggtctctgggtgtgtgggaagatgtgttcatcgtcacctgatagggaagctggctgctccagggtctctgcgtgtgtgggaggatgtgttcatcgtcacctgatggagaagctggctgctccggggtctctgtgtgtgtgggaagatgtgttcatcgtcacctgatggagaagctggctgctccggggtctctgcatgtgtgggaggatgtgttcatcgtcacctgatggagaagctggctgctccggggtctcggtgtgtgtgggaagatgtgtcttacgtctgcaattctcctaaatgcagaggagccacagatggattcagctgttctgtgtattgtaccataagccaaacagtttatacttaatgttcggagaagtcccaaatctgtgactcgctgttagtttcatgtaaatattccagtttgaggtagattttcagcctgtgtccccaaatcccaggaacctctggctccctgctacgcctccatggggtttctgcacagcctggaggctgaccactctcacagggctccgggacagatccaagtccctaggtgccggacggtgtcggctcatggatcagagcttcctgcccgggtgctgatgtgggtaattcactctgactctcagatgagggagcagctggcaggaacatcactcaccgcacccagggacgcttttgttttcctgggtctcagtgtggacctcctgcaaaattaggggagctggcaactctcccatcccctgcccacccccgcctccagctgcaaggacgcagctcacacaccctggggaaaccggattggcagttttccttctagagtgtttacttctgaaagagctgctgtggctggcaatggggcccacatctggggccacagccgtctgtcttaacacccacaaggcgcagctcctagcctggccgctgatgggaatcctcagagagcctgtaaaagaatgcacattccccggcctccgacagacccacagagtcaggatagctggagccactcccaggaatctgctgcctcgatacacagctgatgatcctcagatggcatttcaaggccgctcactcttttaccccctccccagttcccttgataccctctggggagaggaaaaggtcaggtctgcctgacccctgtgagagacgggggccctgggaagcgtcttagcgttagttccgcagcagcgccttggtctctgtgccaccaggtggatcccctaggagcctgggaagctgttaggacgcacaggtgagggtcccaggatgcttccatgcatcgggaggatgtggcacttatcagcaaaaccgagaaacctccaccttcttaggggaaaaaaaaatcaatttcaccctctgctttctcctttttttttttttttttttttttttttttgagatggagtctggctctgtcacccaggctggagtgcagtggcgagatctcggctcactgcaacctcaagaatcccttgaacccgggttcaagggattctcctgcctcagcctcccaagtagctggtattacaggcacccaccaccatgcccagctaatttttgtatttttagcagagacaggtttcaccgtgttggacaggctggtctcgaactcctgacctcaggtgatctgccgacctcaggtgatccgctcgcctcagccacccaaagtccactttctcctttaacggtccttccaatgacttcacatcaaaccgaaagaccataaaatagaggtttgctttcagaaaatgaacctagaaaacatgcagggtccatgttcttaatggaagctgctgatttattttataaaaaggaaaaaaaaaagcctcaaagggactgatcttcaaacatcagtgggaggcctcaggccacttttccgtgtgtttgaggggccaggccattcagtacctggccggggagacatattagacaccctggcttattcaggcagcttcatttctccgtcccctccccaccctcggaggtctctgtggatgtgatgtcacacgatcacttgcaaggggaggatgcaccccccaatcctctcccctcatcacctcccccatcccctcccttctacttaatcacaccccaccccctcccctcccctctacctcatcacctccaccccctctcctcccctcccttctacctcatcaccccctacccctcccctcccctctacctaatcacctccccaccccctcccctcccttctacctcatcacccccaccccctctcctcccctcccctctacctcatcaccccccaccccctcccctcccttctacctcatcacccaccacccccttccctccccgccacctcatcaccccccacacccaccctcccctctacctcatcacctccccacccctcacctccacctcatcaccccccaccccctcccctcccctcccttctacctcatcaccccccaccccttccctcccctccacctcatcacccccacacccaccctccctgctacctcatcacccccccaccccctccttcccctctacctcatcaccttgcccacccgcttccctgtacctggtcacctccagaatccttttgttttggtctgtagcagcccacatcttagtctcaggcaagccaaagacccagatcttccccacccctggggctcttctatgttctgccctgtaggggcaggcagagtcccctggggcctgtgtggggaggctgcgtagacctctgctgggtggggaggccacctagatctttgctggggtgggaaggctgtgtagacctctcctgagtggggaggccgcgtagacctctcttgagtgagggagtccgcgtagatctctcctgagtggggaggccacgtagacctctcctgagtggggaggccgcgtagacgcctcctgagtggggaggccgcgtagacctctcctgagtgagggaggccgcgtagacctctcctgagtggggaggccgcgtagacctctcctgagtggggaggccgcgtagacgtctcctgagtggggaggccgcgtagacctctcctgagtgagggaggccgcgtagacctctcctgagtgagggaggccgcgtagacctctcctgagtggggaggccgcgtagacctctcctgagtggggaggccgcgtagacgtctcctgagtggggaggccgcgtagacctctcctgagtgagggaggccgcgtagacctctcctgagtggggaggccgcgtagacctctcctgagtggggaggccgcgtagacctctcctgagtgagggaggccgcgtagacctctcctgagtggggaggccgcgtagacctctcctgagtggggaggccgcgtagacctctcctgagtgagggaggccgcgtagacctctcctgagtggggaggccgcgtagacctctcctgagtgggggaggccgcgtagacctctcctgagtgggggaggccgcgtagacctctcctgagtggggaggccgcgtagacctctcctgagtgagggtggccgcgtagaactctcctgagtgggggaggccgcgtagacctctcctgagtgggggaggccgcgtagacctctcctgagtggggaggccgcgtagacctctcctgagtggggaggccgcgtagacctctcctgagtggggaggccgtgtagacctctcctgagtgagggaggccgcgtagatctctcctgagtgaggaggccgtgtagatctctcctgagtgagggaggccgtgtggacctctcctggggtaaggaaggccgcgtggacctctcctggggtaaggaaggccgcgtggacctctcctgagtgagggaggccgcgtggacctctcctgagtgagggaggccgcgtggacctctcctgagtgagggaggccgcgtggacctctcctgagtgagggaggccgcgtggacctctcctgagtggggaggccgcgtggacctctcctgagtgagggaagccgtgtggacctctcctggggtaaggaaggccgtgtagacctctcctgagtgagggaggctgcgtagatctctcctgagtggggaggcggtgtggacctctcctggggtaaggaaggccgtgtagacctctcctgagtgagggaggccgtgtagacctctcctggggtgaggagaccatgtagattgctcctgagtggggaggctgcatagacctctcctgggtggaggcccagctcttctcggaaacctggtacagagtgaggggctggatgcagctgagaaaatgcagtgtcggtcacacctggatcagggagggggacctgggggctgcctgctctcctgtgtggagggtgggagggcctggcattgggttggggtggggagagggctggagaccgcgacacacgcccctggggaggtgcccccaccgccaggcctcctgcccagcacgctccgggccctgcgccctgccctgcactcacaccttctctcccgctccccgcaggccacggactctgactacgaggacgcgctgcccaagcactccttcgtgaaccactacatgagcgaccccacctactacaactcatggaagcgcagggcccagggccgcgcacctgcgccgcacaggtacgaggcggtggcgggctccgaggcgggcgcgcagctgcacccggtcatcaccacgcagagcgcgggcggcgtctacacccccgctggccccggcgcgcgaactccgctcaccggcttctcctccttcgtgtgagcaaagcgccgcgcctccctcagggcggaacggaggcaactttccggagtctatttttgttaagacaatcaactccaataactgagctgaagtttttgtttaaaaagaaaaaaatctgataagtgatgattttacctacttgtggacactagatttcaattaggaaggtttttttaaacggctttttgtaacttcgctgcaggaagcaggtttgtttctttttcttttctttttaagagaaggtgtatttcactggtgcaatggcttggcacctccggggcctgggaggacctcagacctccccagccctgggtttctccgtcttcaagaccaactaggaagggtcaagcggggagagggagtggagggtcaggtgagatctcagagctgccccggccggcccccgtctctttctacctcctcttccagagaaccagcggctcacacccttctcaacgcaggacatcctcggcggctcctggggtttgaagagcaaacgtttttccctgggctcagtgcgttttgtcccaacttcatctgtttctgaaatgttctcacttggcagtgtctagtcaaggagtcggctttcaggttcctgacggccaggcagggatgctaaggtgtggctcagccgtcactgtctgtgtcactgcagtggtgcggtcctcaggcttttctgcctgtctttcccccttccttctcacctgacagcgagggagagggaagcctcttagggctggaagccaccacgctggccctctccttccccgaacacagcacacggtcaactccgcgggacacgaggacacgggacggcgtctccagaattgcttgttacgtaggaagcgtgcattgttaaccagagtatttttaaaatctttttatctttttttaaactatgtcacatgaaatgaatgcgtctttgctgtctccaggtgcctttttattaattgttcagctttgtacatgggaaagatgaaaagcaacagtgtctgcaaataaagcaaaacagctctgagaacacacgctcccgactcgcctcgtgcacaccaggccgtcccctccctctgtcctggcttctgctggctgctcgcagcagccaccgcttctccaccactggcgctgctgctgccccctctcccagtccgaggccagcttttagccttaacaggttttttggaaatgtttcttttttttatttaaaattgtcattgtttggtttaaatttttcagctagatgaaaagagtatgaactactttggaaaacttaacagctcagagatggccatgcctccagcccctcacgtcatctttgcaacagacgactgggctgccatggtccacccctcagcccgggtcccgggtctggatggaacgggagcactgctggtgcccactggcgtgtgtgccccgggtccctgtaagtgccccctcaccagcagcagcgtgacacacacaagactcaagaccaccctgtcagtgccccccagtgcacggcaaacgggcaggtgccgttcccccagtgacctgagggtaggggacaactgagcagtatctgaccagtgccacccaggagccagtctcctggccacatgcagaaagtgtggcccctgcttacctagatgttttgtgcacctccatgggcagagggtgtggatattgcctggattctgtgctgtcagcgttgctgagtatggccccaggagaccaaggagagttttgtataggctggaaaaccccttttcagtctttccaaaattagagggtatggcaagtttccttttttctctcctcccttccttcccctccttcctttcctttacccctcctttccttccttcctcccttcctctcttctttcctccctccctccctccttccctcccttccttcctctctttcctccttccttccctcccttctttccctccctcccttcctctctcccctattccttcttccttttctcctcctttttctgagtggagggggaaatattctaaaccaaaaatcctagatgctctgcccaaagccacttctgcatgagaatcgcaacccacagttccccggatgagactcaccacagtggacagtgccacctccttcccctcggccccggagagggcgaagtgggcgggaagccaggatgtgagcactggaatttcttggaagagaagcgataaatggagaccatggccagcgctgctttctgtgcactctgatgactgctctctgcagccatgaggatgtggctttacatgccagggagagtgttgagacgtcttaggttgaggatgagcagattcgagatatgtttgttgctctcgggttttcgatacaacatcatgacacttctgtttcaagctcatgttttccgtctcccctccactcttagtaaaccttgatctgtacggagcggcctgtccgaggctacgccggcctcctggctgctgctggactgtgcttaggacagcgcccatgcctcggagggactctgtcccatgagaaccacctgtgcaaaggaacagagctggatgtttccaggtagattttggcctcccagagcaatgcggcatttgagaagcaacagttcctaactccttatcttcagggaaggaaaagaaaatcacagcctaggaagatggaggttggattttaatctcggttttaaaaagaggacaaacaaaatgtctctaagccaggctagatggaatgtgctcccgctctctcctgccgtgctgaaagtcatgccttgcggatgcctcatgacagcagtggctgagtctccccacccacccccaacgtggctcatttcagattgcttcggccccaccctgcaaggatgtggtcacggagtggccaggaggctccgtctgagccacagggatgggtgtgcagagctccctcctcctggggtgccagggcagagattccaggcaggtgagcccagagagagctgccaggccacaccccctcggcctcctgcacggccaccttctgggtgaatcggtccagcccaagcccctctccccagcctcgccttcagcctctctcccagcctgcttttataaggcgcacttcactcaatgctgtagccaaaaaacgaggggccccagggagaggggacccagatggccacacacggaacgcgcctccacagccccgggaggtggctcactctgtacaggtcttcggaggccgtgtttgtatctaactgtgactgggctgaagcatgatgtttgcctaatggttcgtagcatggtttttatttcttacgcattcttggcacacagtgtagctatcctcctgacgagcaacccgtctgcgtacctaagtgtggctccccgtgggtcagcgtcctggtagcatggatccagtctgaaaggtgaggacaacgtggaaactcatgagctgagcctgcccgctgggacacgtctccttcccgcgtcaccttctggtttagggagccgtcaggtccctaaacgttccctacaactttttctgaaattgtgcagaaaaacagatctcattaaaagaaaaaaagaaacaacttgtaggaagacagagaggtgctatgggtacaatttttaataaaaacattattttgttccttaaacgcttgtgattttcttcaagcattgatgcaattattcgggagaccttaggaaccttctggatttgaaaagctgtaaatatgaaccactgggacttcaccccagtgccgtgctggacccccggcacccccaacacccttacctttatcctgttgacatgcaggtgtgtacaggcagcatcccccaaaattggagttgaggtcaggggtaaagccactccacaccctggccgggtgacctggggcaggcagcatggagcctcagccagtgagacccccctgcatggaccagcagccattcccagggccagcccaactccacccaccacctggctggaccaccagagacttcacacgtgtccggaggaaaagaacagctcatagccaaacttagccttgggtgggcggaagtggagctgtgagcaagacggcctttgcctcctaaggggtctgtccacaccacagcttgtcacgccccaggcgtgctctgggtcgagggaatgagacgagaccattcccttccctttcggaagtggaattttgcttgtttctttctttttaagagacggggtctcaccctgttgcttaggatggagtgtagtggtgtgatcatagctcactgcaactttaacctcctgggctcaagtgatcctcccacctcggcctccctaagtgctgggactgcagggtgcctgaagtggaattttcaaaggcatctgccagtcactgcaggtaccctgggcttctatgaaacacggggccactgaggcagccacatgccggggccagcaggaggaagcatggctgcccccttatcacccatcttgcagggctttgggcctcagtggccccaggatcgttaaaaatctcagtgtccaggccacacccaggccaattaaatcggagtctctggggatcgggtgcagacatttgttttgaaagctccccaggtgattccaacgcagcaaggaagctactctggtgggaggaggggccggggtggggccggtgttctgaccttgaatgaagggacagggttctgactttgccaacgttaccttttgctccggaagcagtcgctgccactgataagccccaggtaagaaccctttcattttctctgttttcccaccatgttcagcccacatcccaccaccctctataatacgacatgtaagtctgcagatttcccaccatctccaatatttcagaagttgcagctgcggtggaaaaggcccttgacatttactgaacgcacgccatgtgcctgacggtgctctgggttctcgttaatccacagaactcccaccaggaccctgtgaggtaggtacagtcaggggggtcccattgtgtagatgaggaaatgcgcccagagaggtggagccatttgcccaggggtagccagctgaccaaggcagatcagctccaaacctgggcagctgggggctccggagcctggtgtctaggcctgaccactgcactgcactgcctcccacgaggct
